United States Patent Application Publication US 2026/0347845 A1, published November 5, 2026 (application 19/158,352).

The application's sequence listing, which the Patent Office published only in electronic form, follows.

SEQUENCE LISTING (1044 sequences)

SEQ ID NO: 1 - DNA, 32 bp, synthetic construct
  source 1..32: mol_type = other DNA
  misc_feature order(1,4..5,18..20): note = DNA
  misc_feature order(2..3,6..17,21..32): note = RNA
  modified_base order(2..3,23): mod_base = OTHER; note = 2-Prime-O-Methoxyethyl modified nucleoside
  modified_base 19: mod_base = OTHER; note = DNA nucleotide carrying a 6-amino-5-nitro-3-yl-2(1H)-pyridone nucleobase
  modified_base order(12..17,22,24..29): mod_base = OTHER; note = 2-Prime-Fluoro modified nucleoside
  modified_base order(6..11,21,30..32): mod_base = OTHER; note = 2-Prime-O-Methyl modified nucleoside
  modified_base order(1^2,31^32): mod_base = OTHER; note = (1,3-dimethylimidazolidin-2-ylidene) Phosphoramidate linkage
  modified_base order(6..18,19^20,22..31): mod_base = OTHER; note = Phosphorothioate linkage
  modified_base 20^21: mod_base = OTHER; note = Methylphosphonate linkage
  misc_feature 1..32: note = RM5035
taatttggcccttgctctnatggacaaagtct

SEQ ID NO: 2 - DNA, 32 bp, synthetic construct; identical to SEQ ID NO: 1
  source 1..32: mol_type = other DNA
  misc_feature order(1,4..5,18..20): note = DNA
  misc_feature order(2..3,6..17,21..32): note = RNA
  modified_base order(2..3,23): mod_base = OTHER; note = 2-Prime-O-Methoxyethyl modified nucleoside
  modified_base 19: mod_base = OTHER; note = DNA nucleotide carrying a 6-amino-5-nitro-3-yl-2(1H)-pyridone nucleobase
  modified_base order(13,15,17,22,24,26,28): mod_base = OTHER; note = 2-Prime-Fluoro modified nucleoside
  modified_base order(6..12,14,16,21,25,27,29..32): mod_base = OTHER; note = 2-Prime-O-Methyl modified nucleoside
  modified_base order(1^2,31^32): mod_base = OTHER; note = (1,3-dimethylimidazolidin-2-ylidene) Phosphoramidate linkage
  modified_base order(6..18,19^20,22..31): mod_base = OTHER; note = Phosphorothioate linkage
  modified_base 20^21: mod_base = OTHER; note = Methylphosphonate linkage
  misc_feature 1..32: note = RM5036

SEQ ID NO: 3 - DNA, 32 bp, synthetic construct; identical to SEQ ID NO: 1
  source 1..32: mol_type = other DNA
  misc_feature order(1,4..5,18..20): note = DNA
  misc_feature order(2..3,6..17,21..32): note = RNA
  modified_base order(2..3,23): mod_base = OTHER; note = 2-Prime-O-Methoxyethyl modified nucleoside
  modified_base 19: mod_base = OTHER; note = DNA nucleotide carrying a 6-amino-5-nitro-3-yl-2(1H)-pyridone nucleobase
  modified_base order(12..17,22,24..29): mod_base = OTHER; note = 2-Prime-Fluoro modified nucleoside
  modified_base order(6..11,21,30..32): mod_base = OTHER; note = 2-Prime-O-Methyl modified nucleoside
  modified_base order(1^2,31^32): mod_base = OTHER; note = (1,3-dimethylimidazolidin-2-ylidene) Phosphoramidate linkage
  modified_base order(6..20,21..31): mod_base = OTHER; note = Phosphorothioate linkage
  modified_base 20^21: mod_base = OTHER; note = Methylphosphonate linkage
  misc_feature 1..32: note = RM5037

SEQ ID NO: 4 - DNA, 32 bp, synthetic construct; identical to SEQ ID NO: 1
  source 1..32: mol_type = other DNA
  misc_feature order(1,4..5,18..20): note = DNA
  misc_feature order(2..3,6..17,21..32): note = RNA
  modified_base order(2..3,23): mod_base = OTHER; note = 2-Prime-O-Methoxyethyl modified nucleoside
  modified_base 19: mod_base = OTHER; note = DNA nucleotide carrying a 6-amino-5-nitro-3-yl-2(1H)-pyridone nucleobase
  modified_base order(13,15,17,22,24,26,28): mod_base = OTHER; note = 2-Prime-Fluoro modified nucleoside
  modified_base order(6..12,14,16,21,25,27,29..32): mod_base = OTHER; note = 2-Prime-O-Methyl modified nucleoside
  modified_base order(1^2,31^32): mod_base = OTHER; note = (1,3-dimethylimidazolidin-2-ylidene) Phosphoramidate linkage
  modified_base order(6..20,21..31): mod_base = OTHER; note = Phosphorothioate linkage
  modified_base 20^21: mod_base = OTHER; note = Methylphosphonate linkage
  misc_feature 1..32: note = RM5038

SEQ ID NO: 5 - DNA, 30 bp, synthetic construct
  source 1..30: mol_type = other DNA
  misc_feature order(2..4,16..18): note = DNA
  misc_feature order(1,5..15,19..30): note = RNA
  modified_base order(1,5,21): mod_base = OTHER; note = 2-Prime-O-Methoxyethyl modified nucleoside
  modified_base 17: mod_base = OTHER; note = DNA nucleotide carrying a 6-amino-5-nitro-3-yl-2(1H)-pyridone nucleobase
  modified_base order(10..15,20,22..27): mod_base = OTHER; note = 2-Prime-Fluoro modified nucleoside
  modified_base order(6..9,19,28..30): mod_base = OTHER; note = 2-Prime-O-Methyl modified nucleoside
  modified_base order(1^2,29^30): mod_base = OTHER; note = (1,3-dimethylimidazolidin-2-ylidene) Phosphoramidate linkage
  modified_base order(6..16,17^18,20..29): mod_base = OTHER; note = Phosphorothioate linkage
  modified_base 18^19: mod_base = OTHER; note = Methylphosphonate linkage
  misc_feature 1..30: note = RM5039
atttggcccttgctctnatggacaaagtct

SEQ ID NO: 6 - DNA, 30 bp, synthetic construct; identical to SEQ ID NO: 5
  source 1..30: mol_type = other DNA
  misc_feature order(2..4,16..18): note = DNA
  misc_feature order(1,5..15,19..30): note = RNA
  modified_base order(1,5,21): mod_base = OTHER; note = 2-Prime-O-Methoxyethyl modified nucleoside
  modified_base 17: mod_base = OTHER; note = DNA nucleotide carrying a 6-amino-5-nitro-3-yl-2(1H)-pyridone nucleobase
  modified_base order(11,13,15,20,22,24,26): mod_base = OTHER; note = 2-Prime-Fluoro modified nucleoside
  modified_base order(6..10,12,14,19,23,25,27..30): mod_base = OTHER; note = 2-Prime-O-Methyl modified nucleoside
  modified_base order(1^2,29^30): mod_base = OTHER; note = (1,3-dimethylimidazolidin-2-ylidene) Phosphoramidate linkage
  modified_base order(6..16,17^18,20..29): mod_base = OTHER; note = Phosphorothioate linkage
  modified_base 18^19: mod_base = OTHER; note = Methylphosphonate linkage
  misc_feature 1..30: note = RM5040

SEQ ID NO: 7 - DNA, 30 bp, synthetic construct; identical to SEQ ID NO: 5
  source 1..30: mol_type = other DNA
  misc_feature order(2..4,16..18): note = DNA
  misc_feature order(1,5..15,19..30): note = RNA
  modified_base order(1,5,21): mod_base = OTHER; note = 2-Prime-O-Methoxyethyl modified nucleoside
  modified_base 17: mod_base = OTHER; note = DNA nucleotide carrying a 6-amino-5-nitro-3-yl-2(1H)-pyridone nucleobase
  modified_base order(10..15,20,22..27): mod_base = OTHER; note = 2-Prime-Fluoro modified nucleoside
  modified_base order(6..9,19,28..30): mod_base = OTHER; note = 2-Prime-O-Methyl modified nucleoside
  modified_base order(1^2,29^30): mod_base = OTHER; note = (1,3-dimethylimidazolidin-2-ylidene) Phosphoramidate linkage
  modified_base order(6..18,19..29): mod_base = OTHER; note = Phosphorothioate linkage
  modified_base 18^19: mod_base = OTHER; note = Methylphosphonate linkage
  misc_feature 1..30: note = RM5041

SEQ ID NO: 8 - DNA, 30 bp, synthetic construct; identical to SEQ ID NO: 5
  source 1..30: mol_type = other DNA
  misc_feature order(2..4,16..18): note = DNA
  misc_feature order(1,5..15,19..30): note = RNA
  modified_base order(1,5,21): mod_base = OTHER; note = 2-Prime-O-Methoxyethyl modified nucleoside
  modified_base 17: mod_base = OTHER; note = DNA nucleotide carrying a 6-amino-5-nitro-3-yl-2(1H)-pyridone nucleobase
  modified_base order(11,13,15,20,22,24,26): mod_base = OTHER; note = 2-Prime-Fluoro modified nucleoside
  modified_base order(6..10,12,14,19,23,25,27..30): mod_base = OTHER; note = 2-Prime-O-Methyl modified nucleoside
  modified_base order(1^2,29^30): mod_base = OTHER; note = (1,3-dimethylimidazolidin-2-ylidene) Phosphoramidate linkage
  modified_base order(6..18,19..29): mod_base = OTHER; note = Phosphorothioate linkage
  modified_base 18^19: mod_base = OTHER; note = Methylphosphonate linkage
  misc_feature 1..30: note = RM5042

SEQ ID NO: 9 - DNA, 28 bp, synthetic construct
  source 1..28: mol_type = other DNA
  misc_feature order(1..2,14..16): note = DNA
  misc_feature order(3..13,17..28): note = RNA
  modified_base order(3..4,19): mod_base = OTHER; note = 2-Prime-O-Methoxyethyl modified nucleoside
  modified_base 5: mod_base = OTHER; note = 2-Prime-O-Methoxyethyl modified 5-methyl Cytidine
  modified_base 15: mod_base = OTHER; note = DNA nucleotide carrying a 6-amino-5-nitro-3-yl-2(1H)-pyridone nucleobase
  modified_base order(8..13,18,20..25): mod_base = OTHER; note = 2-Prime-Fluoro modified nucleoside
  modified_base order(6..7,17,26..28): mod_base = OTHER; note = 2-Prime-O-Methyl modified nucleoside
  modified_base order(1^2,27^28): mod_base = OTHER; note = (1,3-dimethylimidazolidin-2-ylidene) Phosphoramidate linkage
  modified_base order(6..14,15^16,18..27): mod_base = OTHER; note = Phosphorothioate linkage
  modified_base 16^17: mod_base = OTHER; note = Methylphosphonate linkage
  misc_feature 1..28: note = RM5043
ttggcccttgctctnatggacaaagtct

SEQ ID NO: 10 - DNA, 28 bp, synthetic construct
  source 1..28: mol_type = other DNA
  misc_feature order(1..2,14..16): note = DNA
  misc_feature order(3..13,17..28): note = RNA
  modified_base order(3..4,19): mod_base = OTHER; note = 2-Prime-O-Methoxyethyl modified nucleoside
  modified_base 5: mod_base = OTHER; note = 2-Prime-O-Methoxyethyl modified 5-methyl Cytidine
  modified_base 15: mod_base = OTHER; note = DNA nucleotide carrying a 6-amino-5-nitro-3-yl-2(1H)-pyridone nucleobase
  modified_base order(9,11,13,18,20,22,24): mod_base = OTHER; note = 2-Prime-Fluoro modified nucleoside
  modified_base order(6..8,10,12,17,21,23,25..28): mod_base = OTHER; note = 2-Prime-O-Methyl modified nucleoside
  modified_base order(1^2,27^28): mod_base = OTHER; note = (1,3-dimethylimidazolidin-2-ylidene) Phosphoramidate linkage
  modified_base order(6..14,15^16,18..27): mod_base = OTHER; note = Phosphorothioate linkage
  modified_base 16^17: mod_base = OTHER; note = Methylphosphonate linkage
  misc_feature 1..28: note = RM5044
ttggcccttgctctnatggacaaagtct

SEQ ID NO: 11 - DNA, 28 bp, synthetic construct
  source 1..28: mol_type = other DNA
  misc_feature order(1..2,14..16): note = DNA
  misc_feature order(3..13,17..28): note = RNA
  modified_base order(3..4,19): mod_base = OTHER; note = 2-Prime-O-Methoxyethyl modified nucleoside
  modified_base 5: mod_base = OTHER; note = 2-Prime-O-Methoxyethyl modified 5-methyl Cytidine
  modified_base 15: mod_base = OTHER; note = DNA nucleotide carrying a 6-amino-5-nitro-3-yl-2(1H)-pyridone nucleobase
  modified_base order(8..13,18,20..25): mod_base = OTHER; note = 2-Prime-Fluoro modified nucleoside
  modified_base order(6..7,17,26..28): mod_base = OTHER; note = 2-Prime-O-Methyl modified nucleoside
  modified_base order(1^2,27^28): mod_base = OTHER; note = (1,3-dimethylimidazolidin-2-ylidene) Phosphoramidate linkage
  modified_base order(6..16,17..27): mod_base = OTHER; note = Phosphorothioate linkage
  modified_base 16^17: mod_base = OTHER; note = Methylphosphonate linkage
  misc_feature 1..28: note = RM5045
ttggcccttgctctnatggacaaagtct

SEQ ID NO: 12 - DNA, 28 bp, synthetic construct
  source 1..28: mol_type = other DNA
  misc_feature order(1..2,14..16): note = DNA
  misc_feature order(3..13,17..28): note = RNA
  modified_base order(3..4,19): mod_base = OTHER; note = 2-Prime-O-Methoxyethyl modified nucleoside
  modified_base 5: mod_base = OTHER; note = 2-Prime-O-Methoxyethyl modified 5-methyl Cytidine
  modified_base 15: mod_base = OTHER; note = DNA nucleotide carrying a 6-amino-5-nitro-3-yl-2(1H)-pyridone nucleobase
  modified_base order(9,11,13,18,20,22,24): mod_base = OTHER; note = 2-Prime-Fluoro modified nucleoside
  modified_base order(6..8,10,12,17,21,23,25..28): mod_base = OTHER; note = 2-Prime-O-Methyl modified nucleoside
  modified_base order(1^2,27^28): mod_base = OTHER; note = (1,3-dimethylimidazolidin-2-ylidene) Phosphoramidate linkage
  modified_base order(6..16,17..27): mod_base = OTHER; note = Phosphorothioate linkage
  modified_base 16^17: mod_base = OTHER; note = Methylphosphonate linkage
  misc_feature 1..28: note = RM5046
ttggcccttgctctnatggacaaagtct

SEQ ID NO: 13 - DNA, 26 bp, synthetic construct
  source 1..26: mol_type = other DNA
  misc_feature 12..14: note = DNA
  misc_feature order(1..11,15..26): note = RNA
  modified_base order(1..2,17): mod_base = OTHER; note = 2-Prime-O-Methoxyethyl modified nucleoside
  modified_base 3: mod_base = OTHER; note = 2-Prime-O-Methoxyethyl modified 5-methyl Cytidine
  modified_base 13: mod_base = OTHER; note = DNA nucleotide carrying a 6-amino-5-nitro-3-yl-2(1H)-pyridone nucleobase
  modified_base order(6..11,16,18..23): mod_base = OTHER; note = 2-Prime-Fluoro modified nucleoside
  modified_base order(4..5,15,24..26): mod_base = OTHER; note = 2-Prime-O-Methyl modified nucleoside
  modified_base order(1^2,25^26): mod_base = OTHER; note = (1,3-dimethylimidazolidin-2-ylidene) Phosphoramidate linkage
  modified_base order(4..12,13^14,16..25): mod_base = OTHER; note = Phosphorothioate linkage
  modified_base 14^15: mod_base = OTHER; note = Methylphosphonate linkage
  misc_feature 1..26: note = RM5047
ggcccttgctctnatggacaaagtct

SEQ ID NO: 14 - DNA, 26 bp, synthetic construct
  source 1..26: mol_type = other DNA
  misc_feature 12..14: note = DNA
  misc_feature order(1..11,15..26): note = RNA
  modified_base order(1..2,17): mod_base = OTHER; note = 2-Prime-O-Methoxyethyl modified nucleoside
  modified_base 3: mod_base = OTHER; note = 2-Prime-O-Methoxyethyl modified 5-methyl Cytidine
  modified_base 13: mod_base = OTHER; note = DNA nucleotide carrying a 6-amino-5-nitro-3-yl-2(1H)-pyridone nucleobase
  modified_base order(7,9,11,16,18,20,22): mod_base = OTHER; note = 2-Prime-Fluoro modified nucleoside
  modified_base order(4..6,8,10,15,19,21,23..26): mod_base = OTHER; note = 2-Prime-O-Methyl modified nucleoside
  modified_base order(1^2,25^26): mod_base = OTHER; note = (1,3-dimethylimidazolidin-2-ylidene) Phosphoramidate linkage
  modified_base order(4..12,13^14,16..25): mod_base = OTHER; note = Phosphorothioate linkage
  modified_base 14^15: mod_base = OTHER; note = Methylphosphonate linkage
  misc_feature 1..26: note = RM5048
ggcccttgctctnatggacaaagtct

SEQ ID NO: 15 - DNA, 26 bp, synthetic construct
  source 1..26: mol_type = other DNA
  misc_feature 12..14: note = DNA
  misc_feature order(1..11,15..26): note = RNA
  modified_base order(1..2,17): mod_base = OTHER; note = 2-Prime-O-Methoxyethyl modified nucleoside
  modified_base 3: mod_base = OTHER; note = 2-Prime-O-Methoxyethyl modified 5-methyl Cytidine
  modified_base 13: mod_base = OTHER; note = DNA nucleotide carrying a 6-amino-5-nitro-3-yl-2(1H)-pyridone nucleobase
  modified_base order(6..11,16,18..23): mod_base = OTHER; note = 2-Prime-Fluoro modified nucleoside
  modified_base order(4..5,15,24..26): mod_base = OTHER; note = 2-Prime-O-Methyl modified nucleoside
  modified_base order(1^2,25^26): mod_base = OTHER; note = (1,3-dimethylimidazolidin-2-ylidene) Phosphoramidate linkage
  modified_base order(4..14,15..25): mod_base = OTHER; note = Phosphorothioate linkage
  modified_base 14^15: mod_base = OTHER; note = Methylphosphonate linkage
  misc_feature 1..26: note = RM5049
ggcccttgctctnatggacaaagtct

SEQ ID NO: 16 - DNA, 26 bp, synthetic construct
  source 1..26: mol_type = other DNA
  misc_feature 12..14: note = DNA
  misc_feature order(1..11,15..26): note = RNA
  modified_base order(1..2,17): mod_base = OTHER; note = 2-Prime-O-Methoxyethyl modified nucleoside
  modified_base 3: mod_base = OTHER; note = 2-Prime-O-Methoxyethyl modified 5-methyl Cytidine
  modified_base 13: mod_base = OTHER; note = DNA nucleotide carrying a 6-amino-5-nitro-3-yl-2(1H)-pyridone nucleobase
  modified_base order(7,9,11,16,18,20,22): mod_base = OTHER; note = 2-Prime-Fluoro modified nucleoside
  modified_base order(4..6,8,10,15,19,21,23..26): mod_base = OTHER; note = 2-Prime-O-Methyl modified nucleoside
  modified_base order(1^2,25^26): mod_base = OTHER; note = (1,3-dimethylimidazolidin-2-ylidene) Phosphoramidate linkage
  modified_base order(4..14,15..25): mod_base = OTHER; note = Phosphorothioate linkage
  modified_base 14^15: mod_base = OTHER; note = Methylphosphonate linkage
  misc_feature 1..26: note = RM5050
ggcccttgctctnatggacaaagtct

SEQ ID NO: 17 - DNA, 30 bp, synthetic construct
  source 1..30: mol_type = other DNA
  misc_feature order(1,4..5,18..20): note = DNA
  misc_feature order(2..3,6..17,21..30): note = RNA
  modified_base order(2..3,23): mod_base = OTHER; note = 2-Prime-O-Methoxyethyl modified nucleoside
  modified_base 19: mod_base = OTHER; note = DNA nucleotide carrying a 6-amino-5-nitro-3-yl-2(1H)-pyridone nucleobase
  modified_base order(12..17,22,24..29): mod_base = OTHER; note = 2-Prime-Fluoro modified nucleoside
  modified_base order(6..11,21,30): mod_base = OTHER; note = 2-Prime-O-Methyl modified nucleoside
  modified_base order(1^2,29^30): mod_base = OTHER; note = (1,3-dimethylimidazolidin-2-ylidene) Phosphoramidate linkage
  modified_base order(6..18,19^20,22..29): mod_base = OTHER; note = Phosphorothioate linkage
  modified_base 20^21: mod_base = OTHER; note = Methylphosphonate linkage
  misc_feature 1..30: note = RM5051
taatttggcccttgctctnatggacaaagt

SEQ ID NO: 18 - DNA, 30 bp, synthetic construct; identical to SEQ ID NO: 17
  source 1..30: mol_type = other DNA
  misc_feature order(1,4..5,18..20): note = DNA
  misc_feature order(2..3,6..17,21..30): note = RNA
  modified_base order(2..3,23): mod_base = OTHER; note = 2-Prime-O-Methoxyethyl modified nucleoside
  modified_base 19: mod_base = OTHER; note = DNA nucleotide carrying a 6-amino-5-nitro-3-yl-2(1H)-pyridone nucleobase
  modified_base order(13,15,17,22,24,26,28): mod_base = OTHER; note = 2-Prime-Fluoro modified nucleoside
  modified_base order(6..12,14,16,21,25,27,29..30): mod_base = OTHER; note = 2-Prime-O-Methyl modified nucleoside
  modified_base order(1^2,29^30): mod_base = OTHER; note = (1,3-dimethylimidazolidin-2-ylidene) Phosphoramidate linkage
  modified_base order(6..18,19^20,22..29): mod_base = OTHER; note = Phosphorothioate linkage
  modified_base 20^21: mod_base = OTHER; note = Methylphosphonate linkage
  misc_feature 1..30: note = RM5052

SEQ ID NO: 19 - DNA, 30 bp, synthetic construct; identical to SEQ ID NO: 17
  source 1..30: mol_type = other DNA
  misc_feature order(1,4..5,18..20): note = DNA
  misc_feature order(2..3,6..17,21..30): note = RNA
  modified_base order(2..3,23): mod_base = OTHER; note = 2-Prime-O-Methoxyethyl modified nucleoside
  modified_base 19: mod_base = OTHER; note = DNA nucleotide carrying a 6-amino-5-nitro-3-yl-2(1H)-pyridone nucleobase
  modified_base order(12..17,22,24..29): mod_base = OTHER; note = 2-Prime-Fluoro modified nucleoside
  modified_base order(6..11,21,30): mod_base = OTHER; note = 2-Prime-O-Methyl modified nucleoside
  modified_base order(1^2,29^30): mod_base = OTHER; note = (1,3-dimethylimidazolidin-2-ylidene) Phosphoramidate linkage
  modified_base order(6..20,21..29): mod_base = OTHER; note = Phosphorothioate linkage
  modified_base 20^21: mod_base = OTHER; note = Methylphosphonate linkage
  misc_feature 1..30: note = RM5053

SEQ ID NO: 20 - DNA, 30 bp, synthetic construct; identical to SEQ ID NO: 17
  source 1..30: mol_type = other DNA
  misc_feature order(1,4..5,18..20): note = DNA
  misc_feature order(2..3,6..17,21..30): note = RNA
  modified_base order(2..3,23): mod_base = OTHER; note = 2-Prime-O-Methoxyethyl modified nucleoside
  modified_base 19: mod_base = OTHER; note = DNA nucleotide carrying a 6-amino-5-nitro-3-yl-2(1H)-pyridone nucleobase
  modified_base order(13,15,17,22,24,26,28): mod_base = OTHER; note = 2-Prime-Fluoro modified nucleoside
  modified_base order(6..12,14,16,21,25,27,29..30): mod_base = OTHER; note = 2-Prime-O-Methyl modified nucleoside
  modified_base order(1^2,29^30): mod_base = OTHER; note = (1,3-dimethylimidazolidin-2-ylidene) Phosphoramidate linkage
  modified_base order(6..20,21..29): mod_base = OTHER; note = Phosphorothioate linkage
  modified_base 20^21: mod_base = OTHER; note = Methylphosphonate linkage
  misc_feature 1..30: note = RM5054

SEQ ID NO: 21 - DNA, 28 bp, synthetic construct
  source 1..28: mol_type = other DNA
  misc_feature order(1,4..5,18..20): note = DNA
  misc_feature order(2..3,6..17,21..28): note = RNA
  modified_base order(2..3,23): mod_base = OTHER; note = 2-Prime-O-Methoxyethyl modified nucleoside
  modified_base 19: mod_base = OTHER; note = DNA nucleotide carrying a 6-amino-5-nitro-3-yl-2(1H)-pyridone nucleobase
  modified_base order(12..17,22,24..28): mod_base = OTHER; note = 2-Prime-Fluoro modified nucleoside
  modified_base order(6..11,21): mod_base = OTHER; note = 2-Prime-O-Methyl modified nucleoside
  modified_base order(1^2,27^28): mod_base = OTHER; note = (1,3-dimethylimidazolidin-2-ylidene) Phosphoramidate linkage
  modified_base order(6..18,19^20,22..27): mod_base = OTHER; note = Phosphorothioate linkage
  modified_base 20^21: mod_base = OTHER; note = Methylphosphonate linkage
  misc_feature 1..28: note = RM5055
taatttggcccttgctctnatggacaaa

SEQ ID NO: 22 - DNA, 28 bp, synthetic construct
  source 1..28: mol_type = other DNA
  misc_feature order(1,4..5,18..20): note = DNA
  misc_feature order(2..3,6..17,21..28): note = RNA
  modified_base order(2..3,23): mod_base = OTHER; note = 2-Prime-O-Methoxyethyl modified nucleoside
  modified_base 19: mod_base = OTHER; note = DNA nucleotide carrying a 6-amino-5-nitro-3-yl-2(1H)-pyridone nucleobase
  modified_base order(13,15,17,22,24,26,28): mod_base = OTHER; note = 2-Prime-Fluoro modified nucleoside
  modified_base order(6..12,14,16,21,25,27): mod_base = OTHER; note = 2-Prime-O-Methyl modified nucleoside
  modified_base order(1^2,27^28): mod_base = OTHER; note = (1,3-dimethylimidazolidin-2-ylidene) Phosphoramidate linkage
  modified_base order(6..18,19^20,22..27): mod_base = OTHER; note = Phosphorothioate linkage
  modified_base 20^21: mod_base = OTHER; note = Methylphosphonate linkage
  misc_feature 1..28: note = RM5056
taatttggcccttgctctnatggacaaa

SEQ ID NO: 23 - DNA, 28 bp, synthetic construct
  source 1..28: mol_type = other DNA
  misc_feature order(1,4..5,18..20): note = DNA
  misc_feature order(2..3,6..17,21..28): note = RNA
  modified_base order(2..3,23): mod_base = OTHER; note = 2-Prime-O-Methoxyethyl modified nucleoside
  modified_base 19: mod_base = OTHER; note = DNA nucleotide carrying a 6-amino-5-nitro-3-yl-2(1H)-pyridone nucleobase
  modified_base order(12..17,22,24..28): mod_base = OTHER; note = 2-Prime-Fluoro modified nucleoside
  modified_base order(6..11,21): mod_base = OTHER; note = 2-Prime-O-Methyl modified nucleoside
  modified_base order(1^2,27^28): mod_base = OTHER; note = (1,3-dimethylimidazolidin-2-ylidene) Phosphoramidate linkage
  modified_base order(6..20,21..27): mod_base = OTHER; note = Phosphorothioate linkage
  modified_base 20^21: mod_base = OTHER; note = Methylphosphonate linkage
  misc_feature 1..28: note = RM5057
taatttggcccttgctctnatggacaaa

SEQ ID NO: 24 - DNA, 28 bp, synthetic construct
  source 1..28: mol_type = other DNA
  misc_feature order(1,4..5,18..20): note = DNA
  misc_feature order(2..3,6..17,21..28): note = RNA
  modified_base order(2..3,23): mod_base = OTHER; note = 2-Prime-O-Methoxyethyl modified nucleoside
  modified_base 19: mod_base = OTHER; note = DNA nucleotide carrying a 6-amino-5-nitro-3-yl-2(1H)-pyridone nucleobase
  modified_base order(13,15,17,22,24,26,28): mod_base = OTHER; note = 2-Prime-Fluoro modified nucleoside
  modified_base order(6..12,14,16,21,25,27): mod_base = OTHER; note = 2-Prime-O-Methyl modified nucleoside
  modified_base order(1^2,27^28): mod_base = OTHER; note = (1,3-dimethylimidazolidin-2-ylidene) Phosphoramidate linkage
  modified_base order(6..20,21..27): mod_base = OTHER; note = Phosphorothioate linkage
  modified_base 20^21: mod_base = OTHER; note = Methylphosphonate linkage
  misc_feature 1..28: note = RM5058
taatttggcccttgctctnatggacaaa

SEQ ID NO: 25 - DNA, 30 bp, synthetic construct
  source 1..30: mol_type = other DNA
  misc_feature 23..25: note = DNA
  misc_feature order(1..22,26..30): note = RNA
  modified_base 28: mod_base = OTHER; note = 2-Prime-O-Methoxyethyl modified nucleoside
  modified_base 24: mod_base = OTHER; note = DNA nucleotide carrying a 6-amino-5-nitro-3-yl-2(1H)-pyridone nucleobase
  modified_base order(5..6,9..10,13..14,17..22,27): mod_base = OTHER; note = 2-Prime-Fluoro modified nucleoside
  modified_base order(1..4,7..8,11..12,15..16,26,29..30): mod_base = OTHER; note = 2-Prime-O-Methyl modified nucleoside
  modified_base order(1^2,29^30): mod_base = OTHER; note = (1,3-dimethylimidazolidin-2-ylidene) Phosphoramidate linkage
  modified_base order(2..23,24^25,27..29): mod_base = OTHER; note = Phosphorothioate linkage
  modified_base 25^26: mod_base = OTHER; note = Methylphosphonate linkage
  misc_feature 1..30: note = RM5059
gtcattaatttggcccttgctctnatggac

SEQ ID NO: 26 - DNA, 30 bp, synthetic construct; identical to SEQ ID NO: 25
  source 1..30: mol_type = other DNA
  misc_feature 23..25: note = DNA
  misc_feature order(1..22,26..30): note = RNA
  modified_base 28: mod_base = OTHER; note = 2-Prime-O-Methoxyethyl modified nucleoside
  modified_base 24: mod_base = OTHER; note = DNA nucleotide carrying a 6-amino-5-nitro-3-yl-2(1H)-pyridone nucleobase
  modified_base order(4..5,8..9,11..15,18..19,22,27): mod_base = OTHER; note = 2-Prime-Fluoro modified nucleoside
  modified_base order(1..3,6..7,10,16..17,20..21,26,29..30): mod_base = OTHER; note = 2-Prime-O-Methyl modified nucleoside
  modified_base order(1^2,11^12,14^15,29^30): mod_base = OTHER; note = (1,3-dimethylimidazolidin-2-ylidene) Phosphoramidate linkage
  modified_base order(2..6,8..11,12^13,18..20,21..23,24^25,27..29): mod_base = OTHER; note = Phosphorothioate linkage
  modified_base 25^26: mod_base = OTHER; note = Methylphosphonate linkage
  misc_feature 1..30: note = RM5060

SEQ ID NO: 27 - DNA, 30 bp, synthetic construct; identical to SEQ ID NO: 25
  source 1..30: mol_type = other DNA
  misc_feature 23..25: note = DNA
  misc_feature order(1..22,26..30): note = RNA
  modified_base 28: mod_base = OTHER; note = 2-Prime-O-Methoxyethyl modified nucleoside
  modified_base 24: mod_base = OTHER; note = DNA nucleotide carrying a 6-amino-5-nitro-3-yl-2(1H)-pyridone nucleobase
  modified_base order(4..6,8..9,11,13..15,18..20,22,27): mod_base = OTHER; note = 2-Prime-Fluoro modified nucleoside
  modified_base order(1..3,7,10,12,16..17,21,26,29..30): mod_base = OTHER; note = 2-Prime-O-Methyl modified nucleoside
  modified_base order(1^2,11^12,14^15,29^30): mod_base = OTHER; note = (1,3-dimethylimidazolidin-2-ylidene) Phosphoramidate linkage
  modified_base order(2..6,7..9,10^11,13^14,16..21,22^23,24^25,27..29): mod_base = OTHER; note = Phosphorothioate linkage
  modified_base 25^26: mod_base = OTHER; note = Methylphosphonate linkage
  misc_feature 1..30: note = RM5061

SEQ ID NO: 28 - DNA, 30 bp, synthetic construct; identical to SEQ ID NO: 25
  source 1..30: mol_type = other DNA
  misc_feature order(6,21,23..25): note = DNA
  misc_feature order(1..5,7..20,22,26..30): note = RNA
  modified_base order(7,28): mod_base = OTHER; note = 2-Prime-O-Methoxyethyl modified nucleoside
  modified_base 16: mod_base = OTHER; note = 2-Prime-O-Methoxyethyl modified 5-methyl Cytidine
  modified_base 24: mod_base = OTHER; note = DNA nucleotide carrying a 6-amino-5-nitro-3-yl-2(1H)-pyridone nucleobase
  modified_base order(4..5,8..9,13..15,17,19,22,27): mod_base = OTHER; note = 2-Prime-Fluoro modified nucleoside
  modified_base order(1..3,10..12,18,20,26,29..30): mod_base = OTHER; note = 2-Prime-O-Methyl modified nucleoside
  modified_base order(1^2,11^12,14^15,19^20,29^30): mod_base = OTHER; note = (1,3-dimethylimidazolidin-2-ylidene) Phosphoramidate linkage
  modified_base order(2..6,8..10,13^14,16..18,22^23,24^25,27..29): mod_base = OTHER; note = Phosphorothioate linkage
  modified_base 25^26: mod_base = OTHER; note = Methylphosphonate linkage
  misc_feature 1..30: note = RM5062

SEQ ID NO: 29 - DNA, 30 bp, synthetic construct; identical to SEQ ID NO: 25
  source 1..30: mol_type = other DNA
  misc_feature order(6,10,21,23..25): note = DNA
  misc_feature order(1..5,7..9,11..20,22,26..30): note = RNA
  modified_base order(7,28): mod_base = OTHER; note = 2-Prime-O-Methoxyethyl modified nucleoside
  modified_base order(16,20): mod_base = OTHER; note = 2-Prime-O-Methoxyethyl modified 5-methyl Cytidine
  modified_base 24: mod_base = OTHER; note = DNA nucleotide carrying a 6-amino-5-nitro-3-yl-2(1H)-pyridone nucleobase
  modified_base order(4..5,8..9,11,13..15,17..19,22,27): mod_base = OTHER; note = 2-Prime-Fluoro modified nucleoside
  modified_base order(1..3,12,26,29..30): mod_base = OTHER; note = 2-Prime-O-Methyl modified nucleoside
  modified_base order(1^2,11^12,14^15,19^20,29^30): mod_base = OTHER; note = (1,3-dimethylimidazolidin-2-ylidene) Phosphoramidate linkage
  modified_base order(2..6,8..10,13^14,16..19,22^23,24^25,27..29): mod_base = OTHER; note = Phosphorothioate linkage
  modified_base 25^26: mod_base = OTHER; note = Methylphosphonate linkage
  misc_feature 1..30: note = RM5063

SEQ ID NO: 30 - DNA, 27 bp, synthetic construct
  source 1..27: mol_type = other DNA
  misc_feature order(1..2,9,13,15..17): note = DNA
  misc_feature order(3..8,10..12,14,18..27): note = RNA
  modified_base order(4,20): mod_base = OTHER; note = 2-Prime-O-Methoxyethyl modified nucleoside
  modified_base order(8,12): mod_base = OTHER; note = 2-Prime-O-Methoxyethyl modified 5-methyl Cytidine
  modified_base 16: mod_base = OTHER; note = DNA nucleotide carrying a 6-amino-5-nitro-3-yl-2(1H)-pyridone nucleobase
  modified_base order(5..6,14,19,21,23,25): mod_base = OTHER; note = 2-Prime-Fluoro modified nucleoside
  modified_base order(3,7,10..11,18,22,24,26..27): mod_base = OTHER; note = 2-Prime-O-Methyl modified nucleoside
  modified_base order(2^3,5^6,9..12,14..17,18..26): mod_base = OTHER; note = Phosphorothioate linkage
  modified_base order(3^4,6^7,26^27): mod_base = OTHER; note = (1,3-dimethylimidazolidin-2-ylidene) Phosphoramidate linkage
  modified_base 17^18: mod_base = OTHER; note = Methylphosphonate linkage
  misc_feature 1..27: note = RM5064
tttggcccttgctctnatggacaaagt

SEQ ID NO: 31 - RNA, 101 nt, Homo sapiens
  source 1..101: mol_type = mRNA
tagccaatggcctccttcagttgggacatggtcttaaagactttgtccataagacgaagggccaaattaatgacatatttcaaaaactcaacatatttgat

SEQ ID NO: 32 - DNA, 20 bp, synthetic construct
  source 1..20: mol_type = other DNA
aatggcctccttcagttggg

SEQ ID NO: 33 - DNA, 21 bp, synthetic construct
  source 1..21: mol_type = other DNA
tgatttcactggtttgcagcg

SEQ ID NO: 34 - DNA, 19 bp, synthetic construct
  source 1..19: mol_type = other DNA
  modified_base 10..12: mod_base = OTHER; note = Locked Nucleic Acid
ctttgtccatgagacgaag

SEQ ID NO: 35 - DNA, 20 bp, synthetic construct
  source 1..20: mol_type = other DNA
  modified_base 10..12: mod_base = OTHER; note = Locked Nucleic Acid
ctttgtccataagacgaagg

SEQ ID NO: 36 - DNA, 20 bp, synthetic construct
  source 1..20: mol_type = other DNA
cgattactggcaatgtcccc

SEQ ID NO: 37 - DNA, 21 bp, synthetic construct
  source 1..21: mol_type = other DNA
tctccacactcatcatgccac

SEQ ID NO: 38 - DNA, 20 bp, synthetic construct
  source 1..20: mol_type = other DNA
acttcaactgtccagagggt

SEQ ID NO: 39 - DNA, 20 bp, synthetic construct
  source 1..20: mol_type = other DNA
cctggcgtcgtgattagtga

SEQ ID NO: 40 - DNA, 20 bp, synthetic construct
  source 1..20: mol_type = other DNA
cgagcaagacgttcagtcct

SEQ ID NO: 41 - DNA, 23 bp, synthetic construct
  source 1..23: mol_type = other DNA
  modified_base 4: mod_base = OTHER; note = Locked Nucleic Acid
tgctgaggatttggaaagggtgt

SEQ ID NO: 42 - RNA, 68 nt, Mus musculus
  source 1..68: mol_type = mRNA
gctgggtcatggacttaaagattttgtccataagactaagggacaaattaacgacatatttcagaagc

SEQ ID NO: 43 - DNA, 30 bp, synthetic construct; identical to SEQ ID NO: 25
  source 1..30: mol_type = other DNA
  misc_feature 24..25: note = DNA
  misc_feature order(1..23,26..30): note = RNA
  modified_base 28: mod_base = OTHER; note = 2-Prime-O-Methoxyethyl modified nucleoside
  modified_base 23: mod_base = OTHER; note = 2-Prime-O-Methoxyethyl modified 5-methyl Uridine
  modified_base 24: mod_base = OTHER; note = DNA nucleotide carrying a 6-amino-5-nitro-3-yl-2(1H)-pyridone nucleobase
  modified_base order(5..6,9..10,13..14,17..22,27): mod_base = OTHER; note = 2-Prime-Fluoro modified nucleoside
  modified_base order(1..4,7..8,11..12,15..16,26,29..30): mod_base = OTHER; note = 2-Prime-O-Methyl modified nucleoside
  modified_base order(1^2,29^30): mod_base = OTHER; note = (1,3-dimethylimidazolidin-2-ylidene) Phosphoramidate linkage
  modified_base order(2..23,24^25,27..29): mod_base = OTHER; note = Phosphorothioate linkage
  modified_base 25^26: mod_base = OTHER; note = Methylphosphonate linkage
  misc_feature 1..30: note = RM106842

SEQ ID NO: 44 - DNA, 30 bp, synthetic construct
  source 1..30: mol_type = other DNA
  misc_feature 24..25: note = DNA
  misc_feature order(1..23,26..30): note = RNA
  modified_base 28: mod_base = OTHER; note = 2-Prime-O-Methoxyethyl modified nucleoside
  modified_base 23: mod_base = OTHER; note = 2-Prime-O-Methoxyethyl modified 5-methyl Uridine
  modified_base 24: mod_base = OTHER; note = DNA nucleotide carrying a 6-amino-5-nitro-3-yl-2(1H)-pyridone nucleobase
  modified_base order(5..6,9..10,13..14,17..22,27): mod_base = OTHER; note = 2-Prime-Fluoro modified nucleoside
  modified_base order(1..4,7..8,11..12,15..16,26,29..30): mod_base = OTHER; note = 2-Prime-O-Methyl modified nucleoside
  modified_base order(1^2,29^30): mod_base = OTHER; note = (1,3-dimethylimidazolidin-2-ylidene) Phosphoramidate linkage
  modified_base order(2..23,24^25,27..29): mod_base = OTHER; note = Phosphorothioate linkage
  modified_base 25^26: mod_base = OTHER; note = Methylphosphonate linkage
  misc_feature 1..30: note = RM107386
gtcgttaatttgtcccttagtctnatggac

SEQ ID NO: 45 - DNA, 30 bp, synthetic construct
  source 1..30: mol_type = other DNA
  misc_feature 24..25: note = DNA
  misc_feature order(1..23,26..30): note = RNA
  modified_base 28: mod_base = OTHER; note = 2-Prime-O-Methoxyethyl modified nucleoside
  modified_base 23: mod_base = OTHER; note = 2-Prime-O-Methoxyethyl modified 5-methyl Uridine
  modified_base 24: mod_base = OTHER; note = DNA nucleotide carrying a 6-amino-5-nitro-3-yl-2(1H)-pyridone nucleobase
  modified_base order(5..6,9..10,13..14,17..22,27): mod_base = OTHER; note = 2-Prime-Fluoro modified nucleoside
  modified_base order(1..4,7..8,11..12,15..16,26,29..30): mod_base = OTHER; note = 2-Prime-O-Methyl modified nucleoside
  modified_base order(1^2,29^30): mod_base = OTHER; note = (1,3-dimethylimidazolidin-2-ylidene) Phosphoramidate linkage
  modified_base order(2..23,24^25,27..29): mod_base = OTHER; note = Phosphorothioate linkage
  modified_base 25^26: mod_base = OTHER; note = Methylphosphonate linkage
  misc_feature 1..30: note = RM107387
gtcgttaatttgtcccttgctctnatggac

SEQ ID NO: 46 - DNA, 30 bp, synthetic construct
  source 1..30: mol_type = other DNA
  misc_feature 24..25: note = DNA
  misc_feature order(1..23,26..30): note = RNA
  modified_base 28: mod_base = OTHER; note = 2-Prime-O-Methoxyethyl modified nucleoside
  modified_base 23: mod_base = OTHER; note = 2-Prime-O-Methoxyethyl modified 5-methyl Uridine
  modified_base 24: mod_base = OTHER; note = DNA nucleotide carrying a 6-amino-5-nitro-3-yl-2(1H)-pyridone nucleobase
  modified_base order(5..6,9..10,13..14,17..22,27): mod_base = OTHER; note = 2-Prime-Fluoro modified nucleoside
  modified_base order(1..4,7..8,11..12,15..16,26,29..30): mod_base = OTHER; note = 2-Prime-O-Methyl modified nucleoside
  modified_base order(1^2,29^30): mod_base = OTHER; note = (1,3-dimethylimidazolidin-2-ylidene) Phosphoramidate linkage
  modified_base order(2..23,24^25,27..29): mod_base = OTHER; note = Phosphorothioate linkage
  modified_base 25^26: mod_base = OTHER; note = Methylphosphonate linkage
  misc_feature 1..30: note = RM107388
gtcgttaatttgtccctagctctnatggac

SEQ ID NO: 47 - DNA, 30 bp, synthetic construct
  source 1..30: mol_type = other DNA
  misc_feature 24..25: note = DNA
  misc_feature order(1..23,26..30): note = RNA
  modified_base 28: mod_base = OTHER; note = 2-Prime-O-Methoxyethyl modified nucleoside
  modified_base 23: mod_base = OTHER; note = 2-Prime-O-Methoxyethyl modified 5-methyl Uridine
  modified_base 24: mod_base = OTHER; note = DNA nucleotide carrying a 6-amino-5-nitro-3-yl-2(1H)-pyridone nucleobase
  modified_base order(5..6,9..10,13..14,17..22,27): mod_base = OTHER; note = 2-Prime-Fluoro modified nucleoside
  modified_base order(1..4,7..8,11..12,15..16,26,29..30): mod_base = OTHER; note = 2-Prime-O-Methyl modified nucleoside
  modified_base order(1^2,29^30): mod_base = OTHER; note = (1,3-dimethylimidazolidin-2-ylidene) Phosphoramidate linkage
  modified_base order(2..23,24^25,27..29): mod_base = OTHER; note = Phosphorothioate linkage
  modified_base 25^26: mod_base = OTHER; note = Methylphosphonate linkage
  misc_feature 1..30: note = RM107389
gtcgttaatttgtcccttactctnatggac

SEQ ID NO: 48 - DNA, 20 bp, synthetic construct
  source 1..20: mol_type = other DNA
ttttagcgaatggcctcctg

SEQ ID NO: 49 - DNA, 22 bp, synthetic construct
  source 1..22: mol_type = other DNA
cattggttcgaagtgataggtc

SEQ ID NO: 50 - DNA, 24 bp, synthetic construct
  source 1..24: mol_type = other DNA
  modified_base 10..12: mod_base = OTHER; note = Locked Nucleic Acid
ttttgtccataagactaagggaca

SEQ ID NO: 51 - DNA, 22 bp, synthetic construct
  source 1..22: mol_type = other DNA
  modified_base 10..12: mod_base = OTHER; note = Locked Nucleic Acid
ttttgtccatgagactaaggga

SEQ ID NO: 52 - DNA, 20 bp, synthetic construct
  source 1..20: mol_type = other DNA
agattgctggcaatatccct

SEQ ID NO: 53 - DNA, 21 bp, synthetic construct
  source 1..21: mol_type = other DNA
tctccacatatgtcattccac

SEQ ID NO: 54 - DNA, 20 bp, synthetic construct
  source 1..20: mol_type = other DNA
  modified_base order(6,7,12): mod_base = OTHER; note = Locked Nucleic Acid
agctctactgtccagaaagt

SEQ ID NO: 55 - DNA, 23 bp, synthetic construct
  source 1..23: mol_type = other DNA
  misc_feature 18..19: note = DNA
  misc_feature order(1..17,20..23): note = RNA
  modified_base 17: mod_base = OTHER; note = 2-Prime-O-Methoxyethyl modified 5-methyl Uridine
  modified_base 18: mod_base = OTHER; note = DNA nucleotide carrying a 6-amino-5-nitro-3-yl-2(1H)-pyridone nucleobase
  modified_base 21: mod_base = OTHER; note = 2-Prime-Fluoro modified nucleoside
  modified_base order(1..16,20,22..23): mod_base = OTHER; note = 2-Prime-O-Methyl modified nucleoside
  modified_base order(1^2,22^23): mod_base = OTHER; note = (1,3-dimethylimidazolidin-2-ylidene) Phosphoramidate linkage
  modified_base order(2..19,20..22): mod_base = OTHER; note = Phosphorothioate linkage
  modified_base 19^20: mod_base = OTHER; note = Methylphosphonate linkage
  misc_feature 1..23: note = RM114700
aatttggcccttcgtctnatgga

SEQ ID NO: 56 - DNA, 23 bp, synthetic construct
  source 1..23: mol_type = other DNA
  misc_feature 15..16: note = DNA
  misc_feature order(1..14,17..23): note = RNA
  modified_base 14: mod_base = OTHER; note = 2-Prime-O-Methoxyethyl modified 5-methyl Uridine
  modified_base 15: mod_base = OTHER; note = DNA nucleotide carrying a 6-amino-5-nitro-3-yl-2(1H)-pyridone nucleobase
  modified_base 18: mod_base = OTHER; note = 2-Prime-Fluoro modified nucleoside
  modified_base order(1..13,17,19..23): mod_base = OTHER; note = 2-Prime-O-Methyl modified nucleoside
  modified_base order(1^2,22^23): mod_base = OTHER; note = (1,3-dimethylimidazolidin-2-ylidene) Phosphoramidate linkage
  modified_base order(2..16,17..22): mod_base = OTHER; note = Phosphorothioate linkage
  modified_base 16^17: mod_base = OTHER; note = Methylphosphonate linkage
  misc_feature 1..23: note = RM114701
ttggcccttcgtctnatggacaa

SEQ ID NO: 57 - DNA, 23 bp, synthetic construct
  source 1..23: mol_type = other DNA
  misc_feature 12..13: note = DNA
  misc_feature order(1..11,14..23): note = RNA
  modified_base 11: mod_base = OTHER; note = 2-Prime-O-Methoxyethyl modified 5-methyl Uridine
  modified_base 12: mod_base = OTHER; note = DNA nucleotide carrying a 6-amino-5-nitro-3-yl-2(1H)-pyridone nucleobase
  modified_base 15: mod_base = OTHER; note = 2-Prime-Fluoro modified nucleoside
  modified_base order(1..10,14,16..23): mod_base = OTHER; note = 2-Prime-O-Methyl modified nucleoside
  modified_base order(1^2,22^23): mod_base = OTHER; note = (1,3-dimethylimidazolidin-2-ylidene) Phosphoramidate linkage
  modified_base order(2..13,14..22): mod_base = OTHER; note = Phosphorothioate linkage
  modified_base 13^14: mod_base = OTHER; note = Methylphosphonate linkage
  misc_feature 1..23: note = RM114702
gcccttcgtctnatggacaaagt

SEQ ID NO: 58 - DNA, 23 bp, synthetic construct
  source 1..23: mol_type = other DNA
  misc_feature 9..10: note = DNA
  misc_feature order(1..8,11..23): note = RNA
  modified_base 8: mod_base = OTHER; note = 2-Prime-O-Methoxyethyl modified 5-methyl Uridine
  modified_base 9: mod_base = OTHER; note = DNA nucleotide carrying a 6-amino-5-nitro-3-yl-2(1H)-pyridone nucleobase
  modified_base 12: mod_base = OTHER; note = 2-Prime-Fluoro modified nucleoside
  modified_base order(1..7,11,13..23): mod_base = OTHER; note = 2-Prime-O-Methyl modified nucleoside
  modified_base order(1^2,22^23): mod_base = OTHER; note = (1,3-dimethylimidazolidin-2-ylidene) Phosphoramidate linkage
  modified_base order(2..10,11..22): mod_base = OTHER; note = Phosphorothioate linkage
  modified_base 10^11: mod_base = OTHER; note = Methylphosphonate linkage
  misc_feature 1..23: note = RM114703
cttcgtctnatggacaaagtctt

SEQ ID NO: 59 - DNA, 23 bp, synthetic construct
  source 1..23: mol_type = other DNA
  misc_feature 6..7: note = DNA
  misc_feature order(1..5,8..23): note = RNA
  modified_base 5: mod_base = OTHER; note = 2-Prime-O-Methoxyethyl modified 5-methyl Uridine
  modified_base 6: mod_base = OTHER; note = DNA nucleotide carrying a 6-amino-5-nitro-3-yl-2(1H)-pyridone nucleobase
  modified_base 9: mod_base = OTHER; note = 2-Prime-Fluoro modified nucleoside
  modified_base order(1..4,8,10..23): mod_base = OTHER; note = 2-Prime-O-Methyl modified nucleoside
  modified_base order(1^2,22^23): mod_base = OTHER; note = (1,3-dimethylimidazolidin-2-ylidene) Phosphoramidate linkage
  modified_base order(2..7,8..22): mod_base = OTHER; note = Phosphorothioate linkage
  modified_base 7^8: mod_base = OTHER; note = Methylphosphonate linkage
  misc_feature 1..23: note = RM114704
cgtctnatggacaaagtctttaa

SEQ ID NO: 60 - DNA, 26 bp, synthetic construct
  source 1..26: mol_type = other DNA
  misc_feature 22..23: note = DNA
  misc_feature order(1..21,24..26): note = RNA
  modified_base 21: mod_base = OTHER; note = 2-Prime-O-Methoxyethyl modified 5-methyl Uridine
  modified_base 22: mod_base = OTHER; note = DNA nucleotide carrying a 6-amino-5-nitro-3-yl-2(1H)-pyridone nucleobase
  modified_base 25: mod_base = OTHER; note = 2-Prime-Fluoro modified nucleoside
  modified_base order(1..20,24,26): mod_base = OTHER; note = 2-Prime-O-Methyl modified nucleoside
  modified_base order(1^2,25^26): mod_base = OTHER; note = (1,3-dimethylimidazolidin-2-ylidene) Phosphoramidate linkage
  modified_base order(2..23,24^25): mod_base = OTHER; note = Phosphorothioate linkage
  modified_base 23^24: mod_base = OTHER; note = Methylphosphonate linkage
  misc_feature 1..26: note = RM114705
cattaatttggcccttcgtctnatgg

SEQ ID NO: 61 - DNA, 26 bp, synthetic construct
  source 1..26: mol_type = other DNA
  misc_feature 19..20: note = DNA
  misc_feature order(1..18,21..26): note = RNA
  modified_base 18: mod_base = OTHER; note = 2-Prime-O-Methoxyethyl modified 5-methyl Uridine
  modified_base 19: mod_base = OTHER; note = DNA nucleotide carrying a 6-amino-5-nitro-3-yl-2(1H)-pyridone nucleobase
  modified_base 22: mod_base = OTHER; note = 2-Prime-Fluoro modified nucleoside
  modified_base order(1..17,21,23..26): mod_base = OTHER; note = 2-Prime-O-Methyl modified nucleoside
  modified_base order(1^2,25^26): mod_base = OTHER; note = (1,3-dimethylimidazolidin-2-ylidene) Phosphoramidate linkage
  modified_base order(2..20,21..25): mod_base = OTHER; note = Phosphorothioate linkage
  modified_base 20^21: mod_base = OTHER; note = Methylphosphonate linkage
  misc_feature 1..26: note = RM114706
taatttggcccttcgtctnatggaca

SEQ ID NO: 62 - DNA, 26 bp, synthetic construct
  source 1..26: mol_type = other DNA
  misc_feature 16..17: note = DNA
  misc_feature order(1..15,18..26): note = RNA
  modified_base 15: mod_base = OTHER; note = 2-Prime-O-Methoxyethyl modified 5-methyl Uridine
  modified_base 16: mod_base = OTHER; note = DNA nucleotide carrying a 6-amino-5-nitro-3-yl-2(1H)-pyridone nucleobase
  modified_base 19: mod_base = OTHER; note = 2-Prime-Fluoro modified nucleoside
  modified_base order(1..14,18,20..26): mod_base = OTHER; note = 2-Prime-O-Methyl modified nucleoside
  modified_base order(1^2,25^26): mod_base = OTHER; note = (1,3-dimethylimidazolidin-2-ylidene) Phosphoramidate linkage
  modified_base order(2..17,18..25): mod_base = OTHER; note = Phosphorothioate linkage
  modified_base 17^18: mod_base = OTHER; note = Methylphosphonate linkage
  misc_feature 1..26: note = RM114707
tttggcccttcgtctnatggacaaag

SEQ ID NO: 63 - DNA, 26 bp, synthetic construct
  source 1..26: mol_type = other DNA
  misc_feature 13..14: note = DNA
  misc_feature order(1..12,15..26): note = RNA
  modified_base 12: mod_base = OTHER; note = 2-Prime-O-Methoxyethyl modified 5-methyl Uridine
  modified_base 13: mod_base = OTHER; note = DNA nucleotide carrying a 6-amino-5-nitro-3-yl-2(1H)-pyridone nucleobase
  modified_base 16: mod_base = OTHER; note = 2-Prime-Fluoro modified nucleoside
  modified_base order(1..11,15,17..26): mod_base = OTHER; note = 2-Prime-O-Methyl modified nucleoside
  modified_base order(1^2,25^26): mod_base = OTHER; note = (1,3-dimethylimidazolidin-2-ylidene) Phosphoramidate linkage
  modified_base order(2..14,15..25): mod_base = OTHER; note = Phosphorothioate linkage
  modified_base 14^15: mod_base = OTHER; note = Methylphosphonate linkage
  misc_feature 1..26: note = RM114708
ggcccttcgtctnatggacaaagtct

SEQ ID NO: 64 - DNA, 26 bp, synthetic construct
  source 1..26: mol_type = other DNA
  misc_feature 10..11: note = DNA
  misc_feature order(1..9,12..26): note = RNA
  modified_base 9: mod_base = OTHER; note = 2-Prime-O-Methoxyethyl modified 5-methyl Uridine
  modified_base 10: mod_base = OTHER; note = DNA nucleotide carrying a 6-amino-5-nitro-3-yl-2(1H)-pyridone nucleobase
  modified_base 13: mod_base = OTHER; note = 2-Prime-Fluoro modified nucleoside
  modified_base order(1..8,12,14..26): mod_base = OTHER; note = 2-Prime-O-Methyl modified nucleoside
  modified_base order(1^2,25^26): mod_base = OTHER; note = (1,3-dimethylimidazolidin-2-ylidene) Phosphoramidate linkage
  modified_base order(2..11,12..25): mod_base = OTHER; note = Phosphorothioate linkage
  modified_base 11^12: mod_base = OTHER; note = Methylphosphonate linkage
  misc_feature 1..26: note = RM114709
ccttcgtctnatggacaaagtcttta

SEQ ID NO: 65 - DNA, 26 bp, synthetic construct
  source 1..26: mol_type = other DNA
  misc_feature 7..8: note = DNA
  misc_feature order(1..6,9..26): note = RNA
  modified_base 6: mod_base = OTHER; note = 2-Prime-O-Methoxyethyl modified 5-methyl Uridine
  modified_base 7: mod_base = OTHER; note = DNA nucleotide carrying a 6-amino-5-nitro-3-yl-2(1H)-pyridone nucleobase
  modified_base 10: mod_base = OTHER; note = 2-Prime-Fluoro modified nucleoside
  modified_base order(1..5,9,11..26): mod_base = OTHER; note = 2-Prime-O-Methyl modified nucleoside
  modified_base order(1^2,25^26): mod_base = OTHER; note = (1,3-dimethylimidazolidin-2-ylidene) Phosphoramidate linkage
  modified_base order(2..8,9..25): mod_base = OTHER; note = Phosphorothioate linkage
  modified_base 8^9: mod_base = OTHER; note = Methylphosphonate linkage
  misc_feature 1..26: note = RM114710
tcgtctnatggacaaagtctttaaga

SEQ ID NO: 66 - DNA, 29 bp, synthetic construct
  source 1..29: mol_type = other DNA
  misc_feature 24..25: note = DNA
  misc_feature order(1..23,26..29): note = RNA
  modified_base 23: mod_base = OTHER; note = 2-Prime-O-Methoxyethyl modified 5-methyl Uridine
  modified_base 24: mod_base = OTHER; note = DNA nucleotide carrying a 6-amino-5-nitro-3-yl-2(1H)-pyridone nucleobase
  modified_base 27: mod_base = OTHER; note = 2-Prime-Fluoro modified nucleoside
  modified_base order(1..22,26,28..29): mod_base = OTHER; note = 2-Prime-O-Methyl modified nucleoside
  modified_base order(1^2,28^29): mod_base = OTHER; note = (1,3-dimethylimidazolidin-2-ylidene) Phosphoramidate linkage
  modified_base order(2..25,26..28): mod_base = OTHER; note = Phosphorothioate linkage
  modified_base 25^26: mod_base = OTHER; note = Methylphosphonate linkage
  misc_feature 1..29: note = RM114711
gtcattaatttggcccttcgtctnatgga

SEQ ID NO: 67 - DNA, 29 bp, synthetic construct
  source 1..29: mol_type = other DNA
  misc_feature 21..22: note = DNA
  misc_feature order(1..20,23..29): note = RNA
  modified_base 20: mod_base = OTHER; note = 2-Prime-O-Methoxyethyl modified 5-methyl Uridine
  modified_base 21: mod_base = OTHER; note = DNA nucleotide carrying a 6-amino-5-nitro-3-yl-2(1H)-pyridone nucleobase
  modified_base 24: mod_base = OTHER; note = 2-Prime-Fluoro modified nucleoside
  modified_base order(1..19,23,25..29): mod_base = OTHER; note = 2-Prime-O-Methyl modified nucleoside
  modified_base order(1^2,28^29): mod_base = OTHER; note = (1,3-dimethylimidazolidin-2-ylidene) Phosphoramidate linkage
  modified_base order(2..22,23..28): mod_base = OTHER; note = Phosphorothioate linkage
  modified_base 22^23: mod_base = OTHER; note = Methylphosphonate linkage
  misc_feature 1..29: note = RM114712
attaatttggcccttcgtctnatggacaa

SEQ ID NO: 68 - DNA, 29 bp, synthetic construct
  source 1..29: mol_type = other DNA
  misc_feature 18..19: note = DNA
  misc_feature order(1..17,20..29): note = RNA
  modified_base 17: mod_base = OTHER; note = 2-Prime-O-Methoxyethyl modified 5-methyl Uridine
  modified_base 18: mod_base = OTHER; note = DNA nucleotide carrying a 6-amino-5-nitro-3-yl-2(1H)-pyridone nucleobase
  modified_base 21: mod_base = OTHER; note = 2-Prime-Fluoro modified nucleoside
  modified_base order(1..16,20,22..29): mod_base = OTHER; note = 2-Prime-O-Methyl modified nucleoside
  modified_base order(1^2,28^29): mod_base = OTHER; note = (1,3-dimethylimidazolidin-2-ylidene) Phosphoramidate linkage
  modified_base order(2..19,20..28): mod_base = OTHER; note = Phosphorothioate linkage
  modified_base 19^20: mod_base = OTHER; note = Methylphosphonate linkage
  misc_feature 1..29: note = RM114713
aatttggcccttcgtctnatggacaaagt

SEQ ID NO: 69 - DNA, 29 bp, synthetic construct
  source 1..29: mol_type = other DNA
  misc_feature 15..16: note = DNA
  misc_feature order(1..14,17..29): note = RNA
  modified_base 14: mod_base = OTHER; note = 2-Prime-O-Methoxyethyl modified 5-methyl Uridine
  modified_base 15: mod_base = OTHER; note = DNA nucleotide carrying a 6-amino-5-nitro-3-yl-2(1H)-pyridone nucleobase
  modified_base 18: mod_base = OTHER; note = 2-Prime-Fluoro modified nucleoside
  modified_base order(1..13,17,19..29): mod_base = OTHER; note = 2-Prime-O-Methyl modified nucleoside
  modified_base order(1^2,28^29): mod_base = OTHER; note = (1,3-dimethylimidazolidin-2-ylidene) Phosphoramidate linkage
  modified_base order(2..16,17..28): mod_base = OTHER; note = Phosphorothioate linkage
  modified_base 16^17: mod_base = OTHER; note = Methylphosphonate linkage
  misc_feature 1..29: note = RM114714
ttggcccttcgtctnatggacaaagtctt

SEQ ID NO: 70 - DNA, 29 bp, synthetic construct
  source 1..29: mol_type = other DNA
  misc_feature 12..13: note = DNA
  misc_feature order(1..11,14..29): note = RNA
  modified_base 11: mod_base = OTHER; note = 2-Prime-O-Methoxyethyl modified 5-methyl Uridine
  modified_base 12: mod_base = OTHER; note = DNA nucleotide carrying a 6-amino-5-nitro-3-yl-2(1H)-pyridone nucleobase
  modified_base 15: mod_base = OTHER; note = 2-Prime-Fluoro modified nucleoside
  modified_base order(1..10,14,16..29): mod_base = OTHER; note = 2-Prime-O-Methyl modified nucleoside
  modified_base order(1^2,28^29): mod_base = OTHER; note = (1,3-dimethylimidazolidin-2-ylidene) Phosphoramidate linkage
  modified_base order(2..13,14..28): mod_base = OTHER; note = Phosphorothioate linkage
  modified_base 13^14: mod_base = OTHER; note = Methylphosphonate linkage
  misc_feature 1..29: note = RM114715
gcccttcgtctnatggacaaagtctttaa

SEQ ID NO: 71 - DNA, 29 bp, synthetic construct
  source 1..29: mol_type = other DNA
  misc_feature 9..10: note = DNA
  misc_feature order(1..8,11..29): note = RNA
  modified_base 8: mod_base = OTHER; note = 2-Prime-O-Methoxyethyl modified 5-methyl Uridine
  modified_base 9: mod_base = OTHER; note = DNA nucleotide carrying a 6-amino-5-nitro-3-yl-2(1H)-pyridone nucleobase
  modified_base 12: mod_base = OTHER; note = 2-Prime-Fluoro modified nucleoside
  modified_base order(1..7,11,13..29): mod_base = OTHER; note = 2-Prime-O-Methyl modified nucleoside
  modified_base order(1^2,28^29): mod_base = OTHER; note = (1,3-dimethylimidazolidin-2-ylidene) Phosphoramidate linkage
  modified_base order(2..10,11..28): mod_base = OTHER; note = Phosphorothioate linkage
  modified_base 10^11: mod_base = OTHER; note = Methylphosphonate linkage
  misc_feature 1..29: note = RM114716
cttcgtctnatggacaaagtctttaagac

SEQ ID NO: 72 - DNA, 29 bp, synthetic construct
  source 1..29: mol_type = other DNA
  misc_feature 6..7: note = DNA
  misc_feature order(1..5,8..29): note = RNA
  modified_base 5: mod_base = OTHER; note = 2-Prime-O-Methoxyethyl modified 5-methyl Uridine
  modified_base 6: mod_base = OTHER; note = DNA nucleotide carrying a 6-amino-5-nitro-3-yl-2(1H)-pyridone nucleobase
  modified_base 9: mod_base = OTHER; note = 2-Prime-Fluoro modified nucleoside
  modified_base order(1..4,8,10..29): mod_base = OTHER; note = 2-Prime-O-Methyl modified nucleoside
  modified_base order(1^2,28^29): mod_base = OTHER; note = (1,3-dimethylimidazolidin-2-ylidene) Phosphoramidate linkage
  modified_base order(2..7,8..28): mod_base = OTHER; note = Phosphorothioate linkage
  modified_base 7^8: mod_base = OTHER; note = Methylphosphonate linkage
  misc_feature 1..29: note = RM114717
cgtctnatggacaaagtctttaagaccat

SEQ ID NO: 73 - DNA, 32 bp, synthetic construct
  source 1..32: mol_type = other DNA
  misc_feature 28..29: note = DNA
  misc_feature order(1..27,30..32): note = RNA
  modified_base 27: mod_base = OTHER; note = 2-Prime-O-Methoxyethyl modified 5-methyl Uridine
  modified_base 28: mod_base = OTHER; note = DNA nucleotide carrying a 6-amino-5-nitro-3-yl-2(1H)-pyridone nucleobase
  modified_base 31: mod_base = OTHER; note = 2-Prime-Fluoro modified nucleoside
  modified_base order(1..26,30,32): mod_base = OTHER; note = 2-Prime-O-Methyl modified nucleoside
  modified_base order(1^2,31^32): mod_base = OTHER; note = (1,3-dimethylimidazolidin-2-ylidene) Phosphoramidate linkage
  modified_base order(2..29,30^31): mod_base = OTHER; note = Phosphorothioate linkage
  modified_base 29^30: mod_base = OTHER; note = Methylphosphonate linkage
  misc_feature 1..32: note = RM114718
atatgtcattaatttggcccttcgtctnatgg

SEQ ID NO: 74 - DNA, 32 bp, synthetic construct
  source 1..32: mol_type = other DNA
  misc_feature 25..26: note = DNA
  misc_feature order(1..24,27..32): note = RNA
  modified_base 24: mod_base = OTHER; note = 2-Prime-O-Methoxyethyl modified 5-methyl Uridine
  modified_base 25: mod_base = OTHER; note = DNA nucleotide carrying a 6-amino-5-nitro-3-yl-2(1H)-pyridone nucleobase
  modified_base 28: mod_base = OTHER; note = 2-Prime-Fluoro modified nucleoside
  modified_base order(1..23,27,29..32): mod_base = OTHER; note = 2-Prime-O-Methyl modified nucleoside
  modified_base order(1^2,31^32): mod_base = OTHER; note = (1,3-dimethylimidazolidin-2-ylidene) Phosphoramidate linkage
  modified_base order(2..26,27..31): mod_base = OTHER; note = Phosphorothioate linkage
  modified_base 26^27: mod_base = OTHER; note = Methylphosphonate linkage
  misc_feature 1..32: note = RM114719
tgtcattaatttggcccttcgtctnatggaca

SEQ ID NO: 75 - DNA, 32 bp, synthetic construct
  source 1..32: mol_type = other DNA
  misc_feature 22..23: note = DNA
  misc_feature order(1..21,24..32): note = RNA
  modified_base 21: mod_base = OTHER; note = 2-Prime-O-Methoxyethyl modified 5-methyl Uridine
  modified_base 22: mod_base = OTHER; note = DNA nucleotide carrying a 6-amino-5-nitro-3-yl-2(1H)-pyridone nucleobase
  modified_base 25: mod_base = OTHER; note = 2-Prime-Fluoro modified nucleoside
  modified_base order(1..20,24,26..32): mod_base = OTHER; note = 2-Prime-O-Methyl modified nucleoside
  modified_base order(1^2,31^32): mod_base = OTHER; note = (1,3-dimethylimidazolidin-2-ylidene) Phosphoramidate linkage
  modified_base order(2..23,24..31): mod_base = OTHER; note = Phosphorothioate linkage
  modified_base 23^24: mod_base = OTHER; note = Methylphosphonate linkage
  misc_feature 1..32: note = RM114720
cattaatttggcccttcgtctnatggacaaag

SEQ ID NO: 76 - DNA, 32 bp, synthetic construct
  source 1..32: mol_type = other DNA
  misc_feature 19..20: note = DNA
  misc_feature order(1..18,21..32): note = RNA
  modified_base 18: mod_base = OTHER; note = 2-Prime-O-Methoxyethyl modified 5-methyl Uridine
  modified_base 19: mod_base = OTHER; note = DNA nucleotide carrying a 6-amino-5-nitro-3-yl-2(1H)-pyridone nucleobase
  modified_base 22: mod_base = OTHER; note = 2-Prime-Fluoro modified nucleoside
  modified_base order(1..17,21,23..32): mod_base = OTHER; note = 2-Prime-O-Methyl modified nucleoside
  modified_base order(1^2,31^32): mod_base = OTHER; note = (1,3-dimethylimidazolidin-2-ylidene) Phosphoramidate linkage
  modified_base order(2..20,21..31): mod_base = OTHER; note = Phosphorothioate linkage
  modified_base 20^21: mod_base = OTHER; note = Methylphosphonate linkage
  misc_feature 1..32: note = RM114721
taatttggcccttcgtctnatggacaaagtct

SEQ ID NO: 77 - DNA, 32 bp, synthetic construct
  source 1..32: mol_type = other DNA
  misc_feature 16..17: note = DNA
  misc_feature order(1..15,18..32): note = RNA
  modified_base 15: mod_base = OTHER; note = 2-Prime-O-Methoxyethyl modified 5-methyl Uridine
  modified_base 16: mod_base = OTHER; note = DNA nucleotide carrying a 6-amino-5-nitro-3-yl-2(1H)-pyridone nucleobase
  modified_base 19: mod_base = OTHER; note = 2-Prime-Fluoro modified nucleoside
  modified_base order(1..14,18,20..32): mod_base = OTHER; note = 2-Prime-O-Methyl modified nucleoside
  modified_base order(1^2,31^32): mod_base = OTHER; note = (1,3-dimethylimidazolidin-2-ylidene) Phosphoramidate linkage
  modified_base order(2..17,18..31): mod_base = OTHER; note = Phosphorothioate linkage
  modified_base 17^18: mod_base = OTHER; note = Methylphosphonate linkage
  misc_feature 1..32: note = RM114722
tttggcccttcgtctnatggacaaagtcttta

SEQ ID NO: 78 - DNA, 32 bp, synthetic construct
  source 1..32: mol_type = other DNA
  misc_feature 13..14: note = DNA
  misc_feature order(1..12,15..32): note = RNA
  modified_base 12: mod_base = OTHER; note = 2-Prime-O-Methoxyethyl modified 5-methyl Uridine
  modified_base 13: mod_base = OTHER; note = DNA nucleotide carrying a 6-amino-5-nitro-3-yl-2(1H)-pyridone nucleobase
  modified_base 16: mod_base = OTHER; note = 2-Prime-Fluoro modified nucleoside
  modified_base order(1..11,15,17..32): mod_base = OTHER; note = 2-Prime-O-Methyl modified nucleoside
  modified_base order(1^2,31^32): mod_base = OTHER; note = (1,3-dimethylimidazolidin-2-ylidene) Phosphoramidate linkage
  modified_base order(2..14,15..31): mod_base = OTHER; note = Phosphorothioate linkage
  modified_base 14^15: mod_base = OTHER; note = Methylphosphonate linkage
  misc_feature 1..32: note = RM114723
ggcccttcgtctnatggacaaagtctttaaga

SEQ ID NO: 79 - DNA, 32 bp, synthetic construct
  source 1..32: mol_type = other DNA
  misc_feature 10..11: note = DNA
  misc_feature order(1..9,12..32): note = RNA
  modified_base 9: mod_base = OTHER; note = 2-Prime-O-Methoxyethyl modified 5-methyl Uridine
  modified_base 10: mod_base = OTHER; note = DNA nucleotide carrying a 6-amino-5-nitro-3-yl-2(1H)-pyridone nucleobase
  modified_base 13: mod_base = OTHER; note = 2-Prime-Fluoro modified nucleoside
  modified_base order(1..8,12,14..32): mod_base = OTHER; note = 2-Prime-O-Methyl modified nucleoside
  modified_base order(1^2,31^32): mod_base = OTHER; note = (1,3-dimethylimidazolidin-2-ylidene) Phosphoramidate linkage
  modified_base order(2..11,12..31): mod_base = OTHER; note = Phosphorothioate linkage
  modified_base 11^12: mod_base = OTHER; note = Methylphosphonate linkage
  misc_feature 1..32: note = RM114724
ccttcgtctnatggacaaagtctttaagacca

SEQ ID NO: 80 - DNA, 32 bp, synthetic construct
  source 1..32: mol_type = other DNA
  misc_feature 7..8: note = DNA
  misc_feature order(1..6,9..32): note = RNA
  modified_base 6: mod_base = OTHER; note = 2-Prime-O-Methoxyethyl modified 5-methyl Uridine
  modified_base 7: mod_base = OTHER; note = DNA nucleotide carrying a 6-amino-5-nitro-3-yl-2(1H)-pyridone nucleobase
  modified_base 10: mod_base = OTHER; note = 2-Prime-Fluoro modified nucleoside
  modified_base order(1..5,9,11..32): mod_base = OTHER; note = 2-Prime-O-Methyl modified nucleoside
  modified_base order(1^2,31^32): mod_base = OTHER; note = (1,3-dimethylimidazolidin-2-ylidene) Phosphoramidate linkage
  modified_base order(2..8,9..31): mod_base = OTHER; note = Phosphorothioate linkage
  modified_base 8^9: mod_base = OTHER; note = Methylphosphonate linkage
  misc_feature 1..32: note = RM114725
tcgtctnatggacaaagtctttaagaccatgt

SEQ ID NO: 81 - DNA, 26 bp, synthetic construct
  source 1..26: mol_type = other DNA
  misc_feature 16..17: note = DNA
  misc_feature order(1..15,18..26): note = RNA
  modified_base 15: mod_base = OTHER; note = 2-Prime-O-Methoxyethyl modified 5-methyl Uridine
  modified_base 16: mod_base = OTHER; note = DNA nucleotide carrying a 6-amino-5-nitro-3-yl-2(1H)-pyridone nucleobase
  modified_base order(9,11,13,19,22,24,26): mod_base = OTHER; note = 2-Prime-Fluoro modified nucleoside
  modified_base order(1..8,10,12,14,18,20..21,23,25): mod_base = OTHER; note = 2-Prime-O-Methyl modified nucleoside
  modified_base order(1^2,25^26): mod_base = OTHER; note = (1,3-dimethylimidazolidin-2-ylidene) Phosphoramidate linkage
  modified_base order(2..17,18..25): mod_base = OTHER; note = Phosphorothioate linkage
  modified_base 17^18: mod_base = OTHER; note = Methylphosphonate linkage
  misc_feature 1..26: note = RM114726
tttggcccttcgtctnatggacaaag

SEQ ID NO: 82 - DNA, 26 bp, synthetic construct
  source 1..26: mol_type = other DNA
  misc_feature 13..14: note = DNA
  misc_feature order(1..12,15..26): note = RNA
  modified_base 12: mod_base = OTHER; note = 2-Prime-O-Methoxyethyl modified 5-methyl Uridine
  modified_base 13: mod_base = OTHER; note = DNA nucleotide carrying a 6-amino-5-nitro-3-yl-2(1H)-pyridone nucleobase
  modified_base order(6,8,10,16,19,21,23): mod_base = OTHER; note = 2-Prime-Fluoro modified nucleoside
  modified_base order(1..5,7,9,11,15,17..18,20,22,24..26): mod_base = OTHER; note = 2-Prime-O-Methyl modified nucleoside
  modified_base order(1^2,25^26): mod_base = OTHER; note = (1,3-dimethylimidazolidin-2-ylidene) Phosphoramidate linkage
  modified_base order(2..14,15..25): mod_base = OTHER; note = Phosphorothioate linkage
  modified_base 14^15: mod_base = OTHER; note = Methylphosphonate linkage
  misc_feature 1..26: note = RM114727
ggcccttcgtctnatggacaaagtct

SEQ ID NO: 83 - DNA, 26 bp, synthetic construct
  source 1..26: mol_type = other DNA
  misc_feature 10..11: note = DNA
  misc_feature order(1..9,12..26): note = RNA
  modified_base 9: mod_base = OTHER; note = 2-Prime-O-Methoxyethyl modified 5-methyl Uridine
  modified_base 10: mod_base = OTHER; note = DNA nucleotide carrying a 6-amino-5-nitro-3-yl-2(1H)-pyridone nucleobase
  modified_base order(3,5,7,13,16,18,20): mod_base = OTHER; note = 2-Prime-Fluoro modified nucleoside
  modified_base order(1..2,4,6,8,12,14..15,17,19,21..26): mod_base = OTHER; note = 2-Prime-O-Methyl modified nucleoside
  modified_base order(1^2,25^26): mod_base = OTHER; note = (1,3-dimethylimidazolidin-2-ylidene) Phosphoramidate linkage
  modified_base order(2..11,12..25): mod_base = OTHER; note = Phosphorothioate linkage
  modified_base 11^12: mod_base = OTHER; note = Methylphosphonate linkage
  misc_feature 1..26: note = RM114728
ccttcgtctnatggacaaagtcttta

SEQ ID NO: 84 - DNA, 26 bp, synthetic construct
  source 1..26: mol_type = other DNA
  misc_feature 16..17: note = DNA
  misc_feature order(1..15,18..26): note = RNA
  modified_base 15: mod_base = OTHER; note = 2-Prime-O-Methoxyethyl modified 5-methyl Uridine
  modified_base 16: mod_base = OTHER; note = DNA nucleotide carrying a 6-amino-5-nitro-3-yl-2(1H)-pyridone nucleobase
  modified_base order(10,12,14,19,21,23,25): mod_base = OTHER; note = 2-Prime-Fluoro modified nucleoside
  modified_base order(1..9,11,13,18,20,22,24,26): mod_base = OTHER; note = 2-Prime-O-Methyl modified nucleoside
  modified_base order(1^2,25^26): mod_base = OTHER; note = (1,3-dimethylimidazolidin-2-ylidene) Phosphoramidate linkage
  modified_base order(2..17,18..25): mod_base = OTHER; note = Phosphorothioate linkage
  modified_base 17^18: mod_base = OTHER; note = Methylphosphonate linkage
  misc_feature 1..26: note = RM114729
tttggcccttcgtctnatggacaaag

SEQ ID NO: 85 - DNA, 26 bp, synthetic construct
  source 1..26: mol_type = other DNA
  misc_feature 13..14: note = DNA
  misc_feature order(1..12,15..26): note = RNA
  modified_base 12: mod_base = OTHER; note = 2-Prime-O-Methoxyethyl modified 5-methyl Uridine
  modified_base 13: mod_base = OTHER; note = DNA nucleotide carrying a 6-amino-5-nitro-3-yl-2(1H)-pyridone nucleobase
  modified_base order(7,9,11,16,18,20,22): mod_base = OTHER; note = 2-Prime-Fluoro modified nucleoside
  modified_base order(1..6,8,10,15,17,19,21,23..26): mod_base = OTHER; note = 2-Prime-O-Methyl modified nucleoside
  modified_base order(1^2,25^26): mod_base = OTHER; note = (1,3-dimethylimidazolidin-2-ylidene) Phosphoramidate linkage
  modified_base order(2..14,15..25): mod_base = OTHER; note = Phosphorothioate linkage
  modified_base 14^15: mod_base = OTHER; note = Methylphosphonate linkage
  misc_feature 1..26: note = RM114730
ggcccttcgtctnatggacaaagtct

SEQ ID NO: 86 - DNA, 26 bp, synthetic construct
  source 1..26: mol_type = other DNA
  misc_feature 10..11: note = DNA
  misc_feature order(1..9,12..26): note = RNA
  modified_base 9: mod_base = OTHER; note = 2-Prime-O-Methoxyethyl modified 5-methyl Uridine
  modified_base 10: mod_base = OTHER; note = DNA nucleotide carrying a 6-amino-5-nitro-3-yl-2(1H)-pyridone nucleobase
  modified_base order(4,6,8,13,15,17,19): mod_base = OTHER; note = 2-Prime-Fluoro modified nucleoside
  modified_base order(1..3,5,7,12,14,16,18,20..26): mod_base = OTHER; note = 2-Prime-O-Methyl modified nucleoside
  modified_base order(1^2,25^26): mod_base = OTHER; note = (1,3-dimethylimidazolidin-2-ylidene) Phosphoramidate linkage
  modified_base order(2..11,12..25): mod_base = OTHER; note = Phosphorothioate linkage
  modified_base 11^12: mod_base = OTHER; note = Methylphosphonate linkage
  misc_feature 1..26: note = RM114731
ccttcgtctnatggacaaagtcttta

SEQ ID NO: 87 - DNA, 26 bp, synthetic construct
  source 1..26: mol_type = other DNA
  misc_feature 7..8: note = DNA
  misc_feature order(1..6,9..26): note = RNA
  modified_base 6: mod_base = OTHER; note = 2-Prime-O-Methoxyethyl modified 5-methyl Uridine
  modified_base 7: mod_base = OTHER; note = DNA nucleotide carrying a 6-amino-5-nitro-3-yl-2(1H)-pyridone nucleobase
  modified_base order(1,3,5,10,12,14,16): mod_base = OTHER; note = 2-Prime-Fluoro modified nucleoside
  modified_base order(2,4,9,11,13,15,17..26): mod_base = OTHER; note = 2-Prime-O-Methyl modified nucleoside
  modified_base order(1^2,25^26): mod_base = OTHER; note = (1,3-dimethylimidazolidin-2-ylidene) Phosphoramidate linkage
  modified_base order(2..8,9..25): mod_base = OTHER; note = Phosphorothioate linkage
  modified_base 8^9: mod_base = OTHER; note = Methylphosphonate linkage
  misc_feature 1..26: note = RM114732
tcgtctnatggacaaagtctttaaga

SEQ ID NO: 88 - DNA, 26 bp, synthetic construct
  source 1..26: mol_type = other DNA
  misc_feature 16..17: note = DNA
  misc_feature order(1..15,18..26): note = RNA
  modified_base 15: mod_base = OTHER; note = 2-Prime-O-Methoxyethyl modified 5-methyl Uridine
  modified_base 16: mod_base = OTHER; note = DNA nucleotide carrying a 6-amino-5-nitro-3-yl-2(1H)-pyridone nucleobase
  modified_base order(10,12,14,19,22,24,26): mod_base = OTHER; note = 2-Prime-Fluoro modified nucleoside
  modified_base order(1..9,11,13,18,20..21,23,25): mod_base = OTHER; note = 2-Prime-O-Methyl modified nucleoside
  modified_base order(1^2,25^26): mod_base = OTHER; note = (1,3-dimethylimidazolidin-2-ylidene) Phosphoramidate linkage
  modified_base order(2..17,18..25): mod_base = OTHER; note = Phosphorothioate linkage
  modified_base 17^18: mod_base = OTHER; note = Methylphosphonate linkage
  misc_feature 1..26: note = RM114733
tttggcccttcgtctnatggacaaag

SEQ ID NO: 89 - DNA, 26 bp, synthetic construct
  source 1..26: mol_type = other DNA
  misc_feature 13..14: note = DNA
  misc_feature order(1..12,15..26): note = RNA
  modified_base 12: mod_base = OTHER; note = 2-Prime-O-Methoxyethyl modified 5-methyl Uridine
  modified_base 13: mod_base = OTHER; note = DNA nucleotide carrying a 6-amino-5-nitro-3-yl-2(1H)-pyridone nucleobase
  modified_base order(7,9,11,16,19,21,23): mod_base = OTHER; note = 2-Prime-Fluoro modified nucleoside
  modified_base order(1..6,8,10,15,17..18,20,22,24..26): mod_base = OTHER; note = 2-Prime-O-Methyl modified nucleoside
  modified_base order(1^2,25^26): mod_base = OTHER; note = (1,3-dimethylimidazolidin-2-ylidene) Phosphoramidate linkage
  modified_base order(2..14,15..25): mod_base = OTHER; note = Phosphorothioate linkage
  modified_base 14^15: mod_base = OTHER; note = Methylphosphonate linkage
  misc_feature 1..26: note = RM114734
ggcccttcgtctnatggacaaagtct

SEQ ID NO: 90 - DNA, 26 bp, synthetic construct
  source 1..26: mol_type = other DNA
  misc_feature 10..11: note = DNA
  misc_feature order(1..9,12..26): note = RNA
  modified_base 9: mod_base = OTHER; note = 2-Prime-O-Methoxyethyl modified 5-methyl Uridine
  modified_base 10: mod_base = OTHER; note = DNA nucleotide carrying a 6-amino-5-nitro-3-yl-2(1H)-pyridone nucleobase
  modified_base order(4,6,8,13,16,18,20): mod_base = OTHER; note = 2-Prime-Fluoro modified nucleoside
  modified_base order(1..3,5,7,12,14..15,17,19,21..26): mod_base = OTHER; note = 2-Prime-O-Methyl modified nucleoside
  modified_base order(1^2,25^26): mod_base = OTHER; note = (1,3-dimethylimidazolidin-2-ylidene) Phosphoramidate linkage
  modified_base order(2..11,12..25): mod_base = OTHER; note = Phosphorothioate linkage
  modified_base 11^12: mod_base = OTHER; note = Methylphosphonate linkage
  misc_feature 1..26: note = RM114735
ccttcgtctnatggacaaagtcttta

SEQ ID NO: 91 - DNA, 26 bp, synthetic construct
  source 1..26: mol_type = other DNA
  misc_feature 7..8: note = DNA
  misc_feature order(1..6,9..26): note = RNA
  modified_base 6: mod_base = OTHER; note = 2-Prime-O-Methoxyethyl modified 5-methyl Uridine
  modified_base 7: mod_base = OTHER; note = DNA nucleotide carrying a 6-amino-5-nitro-3-yl-2(1H)-pyridone nucleobase
  modified_base order(1,3,5,10,13,15,17): mod_base = OTHER; note = 2-Prime-Fluoro modified nucleoside
  modified_base order(2,4,9,11..12,14,16,18..26): mod_base = OTHER; note = 2-Prime-O-Methyl modified nucleoside
  modified_base order(1^2,25^26): mod_base = OTHER; note = (1,3-dimethylimidazolidin-2-ylidene) Phosphoramidate linkage
  modified_base order(2..8,9..25): mod_base = OTHER; note = Phosphorothioate linkage
  modified_base 8^9: mod_base = OTHER; note = Methylphosphonate linkage
  misc_feature 1..26: note = RM114736
tcgtctnatggacaaagtctttaaga

SEQ ID NO: 92 - DNA, 23 bp, synthetic construct
  source 1..23: mol_type = other DNA
  misc_feature 15..16: note = DNA
  misc_feature order(1..14,17..23): note = RNA
  modified_base 14: mod_base = OTHER; note = 2-Prime-O-Methoxyethyl modified 5-methyl Uridine
  modified_base 15: mod_base = OTHER; note = DNA nucleotide carrying a 6-amino-5-nitro-3-yl-2(1H)-pyridone nucleobase
  modified_base order(9,11,13,18,20,22): mod_base = OTHER; note = 2-Prime-Fluoro modified nucleoside
  modified_base order(1..8,10,12,17,19,21,23): mod_base = OTHER; note = 2-Prime-O-Methyl modified nucleoside
  modified_base order(1^2,22^23): mod_base = OTHER; note = (1,3-dimethylimidazolidin-2-ylidene) Phosphoramidate linkage
  modified_base order(2..16,17..22): mod_base = OTHER; note = Phosphorothioate linkage
  modified_base 16^17: mod_base = OTHER; note = Methylphosphonate linkage
  misc_feature 1..23: note = RM114737
ttggcccttcgtctnatggacaa

SEQ ID NO: 93 - DNA, 23 bp, synthetic construct
  source 1..23: mol_type = other DNA
  misc_feature 12..13: note = DNA
  misc_feature order(1..11,14..23): note = RNA
  modified_base 11: mod_base = OTHER; note = 2-Prime-O-Methoxyethyl modified 5-methyl Uridine
  modified_base 12: mod_base = OTHER; note = DNA nucleotide carrying a 6-amino-5-nitro-3-yl-2(1H)-pyridone nucleobase
  modified_base order(6,8,10,15,17,19): mod_base = OTHER; note = 2-Prime-Fluoro modified nucleoside
  modified_base order(1..5,7,9,14,16,18,20..23): mod_base = OTHER; note = 2-Prime-O-Methyl modified nucleoside
  modified_base order(1^2,22^23): mod_base = OTHER; note = (1,3-dimethylimidazolidin-2-ylidene) Phosphoramidate linkage
  modified_base order(2..13,14..22): mod_base = OTHER; note = Phosphorothioate linkage
  modified_base 13^14: mod_base = OTHER; note = Methylphosphonate linkage
  misc_feature 1..23: note = RM114738
gcccttcgtctnatggacaaagt

SEQ ID NO: 94 - DNA, 23 bp, synthetic construct
  source 1..23: mol_type = other DNA
  misc_feature 9..10: note = DNA
  misc_feature order(1..8,11..23): note = RNA
  modified_base 8: mod_base = OTHER; note = 2-Prime-O-Methoxyethyl modified 5-methyl Uridine
  modified_base 9: mod_base = OTHER; note = DNA nucleotide carrying a 6-amino-5-nitro-3-yl-2(1H)-pyridone nucleobase
  modified_base order(3,5,7,12,14,16): mod_base = OTHER; note = 2-Prime-Fluoro modified nucleoside
  modified_base order(1..2,4,6,11,13,15,17..23): mod_base = OTHER; note = 2-Prime-O-Methyl modified nucleoside
  modified_base order(1^2,22^23): mod_base = OTHER; note = (1,3-dimethylimidazolidin-2-ylidene) Phosphoramidate linkage
  modified_base order(2..10,11..22): mod_base = OTHER; note = Phosphorothioate linkage
  modified_base 10^11: mod_base = OTHER; note = Methylphosphonate linkage
  misc_feature 1..23: note = RM114739
cttcgtctnatggacaaagtctt

SEQ ID NO: 95 - DNA, 32 bp, synthetic construct; identical to SEQ ID NO: 74
  source 1..32: mol_type = other DNA
  misc_feature 25..26: note = DNA
  misc_feature order(1..24,27..32): note = RNA
  modified_base 24: mod_base = OTHER; note = 2-Prime-O-Methoxyethyl modified 5-methyl Uridine
  modified_base 25: mod_base = OTHER; note = DNA nucleotide carrying a 6-amino-5-nitro-3-yl-2(1H)-pyridone nucleobase
  modified_base order(19,21,23,28,30,32): mod_base = OTHER; note = 2-Prime-Fluoro modified nucleoside
  modified_base order(1..18,20,22,27,29,31): mod_base = OTHER; note = 2-Prime-O-Methyl modified nucleoside
  modified_base order(1^2,31^32): mod_base = OTHER; note = (1,3-dimethylimidazolidin-2-ylidene) Phosphoramidate linkage
  modified_base order(2..26,27..31): mod_base = OTHER; note = Phosphorothioate linkage
  modified_base 26^27: mod_base = OTHER; note = Methylphosphonate linkage
  misc_feature 1..32: note = RM114740

SEQ ID NO: 96 - DNA, 32 bp, synthetic construct; identical to SEQ ID NO: 75
  source 1..32: mol_type = other DNA
  misc_feature 22..23: note = DNA
  misc_feature order(1..21,24..32): note = RNA
  modified_base 21: mod_base = OTHER; note = 2-Prime-O-Methoxyethyl modified 5-methyl Uridine
  modified_base 22: mod_base = OTHER; note = DNA nucleotide carrying a 6-amino-5-nitro-3-yl-2(1H)-pyridone nucleobase
  modified_base order(16,18,20,25,27,29): mod_base = OTHER; note = 2-Prime-Fluoro modified nucleoside
  modified_base order(1..15,17,19,24,26,28,30..32): mod_base = OTHER; note = 2-Prime-O-Methyl modified nucleoside
  modified_base order(1^2,31^32): mod_base = OTHER; note = (1,3-dimethylimidazolidin-2-ylidene) Phosphoramidate linkage
  modified_base order(2..23,24..31): mod_base = OTHER; note = Phosphorothioate linkage
  modified_base 23^24: mod_base = OTHER; note = Methylphosphonate linkage
  misc_feature 1..32: note = RM114741

SEQ ID NO: 97 - DNA, 32 bp, synthetic construct; identical to SEQ ID NO: 76
  source 1..32: mol_type = other DNA
  misc_feature 19..20: note = DNA
  misc_feature order(1..18,21..32): note = RNA
  modified_base 18: mod_base = OTHER; note = 2-Prime-O-Methoxyethyl modified 5-methyl Uridine
  modified_base 19: mod_base = OTHER; note = DNA nucleotide carrying a 6-amino-5-nitro-3-yl-2(1H)-pyridone nucleobase
  modified_base order(13,15,17,22,24,26): mod_base = OTHER; note = 2-Prime-Fluoro modified nucleoside
  modified_base order(1..12,14,16,21,23,25,27..32): mod_base = OTHER; note = 2-Prime-O-Methyl modified nucleoside
  modified_base order(1^2,31^32): mod_base = OTHER; note = (1,3-dimethylimidazolidin-2-ylidene) Phosphoramidate linkage
  modified_base order(2..20,21..31): mod_base = OTHER; note = Phosphorothioate linkage
  modified_base 20^21: mod_base = OTHER; note = Methylphosphonate linkage
  misc_feature 1..32: note = RM114742

SEQ ID NO: 98 - DNA, 32 bp, synthetic construct; identical to SEQ ID NO: 77
  source 1..32: mol_type = other DNA
  misc_feature 16..17: note = DNA
  misc_feature order(1..15,18..32): note = RNA
  modified_base 15: mod_base = OTHER; note = 2-Prime-O-Methoxyethyl modified 5-methyl Uridine
  modified_base 16: mod_base = OTHER; note = DNA nucleotide carrying a 6-amino-5-nitro-3-yl-2(1H)-pyridone nucleobase
  modified_base order(10,12,14,19,21,23): mod_base = OTHER; note = 2-Prime-Fluoro modified nucleoside
  modified_base order(1..9,11,13,18,20,22,24..32): mod_base = OTHER; note = 2-Prime-O-Methyl modified nucleoside
  modified_base order(1^2,31^32): mod_base = OTHER; note = (1,3-dimethylimidazolidin-2-ylidene) Phosphoramidate linkage
  modified_base order(2..17,18..31): mod_base = OTHER; note = Phosphorothioate linkage
  modified_base 17^18: mod_base = OTHER; note = Methylphosphonate linkage
  misc_feature 1..32: note = RM114743

SEQ ID NO: 99 - DNA, 32 bp, synthetic construct; identical to SEQ ID NO: 78
  source 1..32: mol_type = other DNA
  misc_feature 13..14: note = DNA
  misc_feature order(1..12,15..32): note = RNA
  modified_base 12: mod_base = OTHER; note = 2-Prime-O-Methoxyethyl modified 5-methyl Uridine
  modified_base 13: mod_base = OTHER; note = DNA nucleotide carrying a 6-amino-5-nitro-3-yl-2(1H)-pyridone nucleobase
  modified_base order(7,9,11,16,18,20): mod_base = OTHER; note = 2-Prime-Fluoro modified nucleoside
  modified_base order(1..6,8,10,15,17,19,21..32): mod_base = OTHER; note = 2-Prime-O-Methyl modified nucleoside
  modified_base order(1^2,31^32): mod_base = OTHER; note = (1,3-dimethylimidazolidin-2-ylidene) Phosphoramidate linkage
  modified_base order(2..14,15..31): mod_base = OTHER; note = Phosphorothioate linkage
  modified_base 14^15: mod_base = OTHER; note = Methylphosphonate linkage
  misc_feature 1..32: note = RM114744

SEQ ID NO: 100 - DNA, 32 bp, synthetic construct; identical to SEQ ID NO: 79
  source 1..32: mol_type = other DNA
  misc_feature 10..11: note = DNA
  misc_feature order(1..9,12..32): note = RNA
  modified_base 9: mod_base = OTHER; note = 2-Prime-O-Methoxyethyl modified 5-methyl Uridine
  modified_base 10: mod_base = OTHER; note = DNA nucleotide carrying a 6-amino-5-nitro-3-yl-2(1H)-pyridone nucleobase
  modified_base order(4,6,8,13,15,17): mod_base = OTHER; note = 2-Prime-Fluoro modified nucleoside
  modified_base order(1..3,5,7,12,14,16,18..32): mod_base = OTHER; note = 2-Prime-O-Methyl modified nucleoside
  modified_base order(1^2,31^32): mod_base = OTHER; note = (1,3-dimethylimidazolidin-2-ylidene) Phosphoramidate linkage
  modified_base order(2..11,12..31): mod_base = OTHER; note = Phosphorothioate linkage
  modified_base 11^12: mod_base = OTHER; note = Methylphosphonate linkage
  misc_feature 1..32: note = RM114745

SEQ ID NO: 101 - DNA, 32 bp, synthetic construct; identical to SEQ ID NO: 80
  source 1..32: mol_type = other DNA
  misc_feature 7..8: note = DNA
  misc_feature order(1..6,9..32): note = RNA
  modified_base 6: mod_base = OTHER; note = 2-Prime-O-Methoxyethyl modified 5-methyl Uridine
  modified_base 7: mod_base = OTHER; note = DNA nucleotide carrying a 6-amino-5-nitro-3-yl-2(1H)-pyridone nucleobase
  modified_base order(1,3,5,10,12,14): mod_base = OTHER; note = 2-Prime-Fluoro modified nucleoside
  modified_base order(2,4,9,11,13,15..32): mod_base = OTHER; note = 2-Prime-O-Methyl modified nucleoside
  modified_base order(1^2,31^32): mod_base = OTHER; note = (1,3-dimethylimidazolidin-2-ylidene) Phosphoramidate linkage
  modified_base order(2..8,9..31): mod_base = OTHER; note = Phosphorothioate linkage
  modified_base 8^9: mod_base = OTHER; note = Methylphosphonate linkage
  misc_feature 1..32: note = RM114746

SEQ ID NO: 102 - DNA, 26 bp, synthetic construct
  source 1..26: mol_type = other DNA
  misc_feature 16..17: note = DNA
  misc_feature order(1..15,18..26): note = RNA
  modified_base 15: mod_base = OTHER; note = 2-Prime-O-Methoxyethyl modified 5-methyl Uridine
  modified_base 16: mod_base = OTHER; note = DNA nucleotide carrying a 6-amino-5-nitro-3-yl-2(1H)-pyridone nucleobase
  modified_base order(9,11,13,19,21,23,25): mod_base = OTHER; note = 2-Prime-Fluoro modified nucleoside
  modified_base order(1..8,10,12,14,18,20,22,24,26): mod_base = OTHER; note = 2-Prime-O-Methyl modified nucleoside
  modified_base order(1^2,25^26): mod_base = OTHER; note = (1,3-dimethylimidazolidin-2-ylidene) Phosphoramidate linkage
  modified_base order(2..17,18..25): mod_base = OTHER; note = Phosphorothioate linkage
  modified_base 17^18: mod_base = OTHER; note = Methylphosphonate linkage
  misc_feature 1..26: note = RM114747
tttggcccttcgtctnatggacaaag

SEQ ID NO: 103 - DNA, 26 bp, synthetic construct
  source 1..26: mol_type = other DNA
  misc_feature 13..14: note = DNA
  misc_feature order(1..12,15..26): note = RNA
  modified_base 12: mod_base = OTHER; note = 2-Prime-O-Methoxyethyl modified 5-methyl Uridine
  modified_base 13: mod_base = OTHER; note = DNA nucleotide carrying a 6-amino-5-nitro-3-yl-2(1H)-pyridone nucleobase
  modified_base order(6,8,10,16,18,20,22): mod_base = OTHER; note = 2-Prime-Fluoro modified nucleoside
  modified_base order(1..5,7,9,11,15,17,19,21,23..26): mod_base = OTHER; note = 2-Prime-O-Methyl modified nucleoside
  modified_base order(1^2,25^26): mod_base = OTHER; note = (1,3-dimethylimidazolidin-2-ylidene) Phosphoramidate linkage
  modified_base order(2..14,15..25): mod_base = OTHER; note = Phosphorothioate linkage
  modified_base 14^15: mod_base = OTHER; note = Methylphosphonate linkage
  misc_feature 1..26: note = RM114748
ggcccttcgtctnatggacaaagtct

SEQ ID NO: 104 - DNA, 26 bp, synthetic construct
  source 1..26: mol_type = other DNA
  misc_feature 10..11: note = DNA
  misc_feature order(1..9,12..26): note = RNA
  modified_base 9: mod_base = OTHER; note = 2-Prime-O-Methoxyethyl modified 5-methyl Uridine
  modified_base 10: mod_base = OTHER; note = DNA nucleotide carrying a 6-amino-5-nitro-3-yl-2(1H)-pyridone nucleobase
  modified_base order(3,5,7,13,15,17,19): mod_base = OTHER; note = 2-Prime-Fluoro modified nucleoside
  modified_base order(1..2,4,6,8,12,14,16,18,20..26): mod_base = OTHER; note = 2-Prime-O-Methyl modified nucleoside
  modified_base order(1^2,25^26): mod_base = OTHER; note = (1,3-dimethylimidazolidin-2-ylidene) Phosphoramidate linkage
  modified_base order(2..11,12..25): mod_base = OTHER; note = Phosphorothioate linkage
  modified_base 11^12: mod_base = OTHER; note = Methylphosphonate linkage
  misc_feature 1..26: note = RM114749
ccttcgtctnatggacaaagtcttta

SEQ ID NO: 105 - DNA, 32 bp, synthetic construct; identical to SEQ ID NO: 73
  source 1..32: mol_type = other DNA
  misc_feature 28..29: note = DNA
  misc_feature order(1..27,30..32): note = RNA
  modified_base 27: mod_base = OTHER; note = 2-Prime-O-Methoxyethyl modified 5-methyl Uridine
  modified_base 28: mod_base = OTHER; note = DNA nucleotide carrying a 6-amino-5-nitro-3-yl-2(1H)-pyridone nucleobase
  modified_base order(10..12,17..18,22..23,26,31): mod_base = OTHER; note = 2-Prime-Fluoro modified nucleoside
  modified_base order(1..9,13..16,19..21,24..25,30,32): mod_base = OTHER; note = 2-Prime-O-Methyl modified nucleoside
  modified_base order(1^2,31^32): mod_base = OTHER; note = (1,3-dimethylimidazolidin-2-ylidene) Phosphoramidate linkage
  modified_base order(2..29,30^31): mod_base = OTHER; note = Phosphorothioate linkage
  modified_base 29^30: mod_base = OTHER; note = Methylphosphonate linkage
  misc_feature 1..32: note = RM114750

SEQ ID NO: 106 - DNA, 32 bp, synthetic construct; identical to SEQ ID NO: 74
  source 1..32: mol_type = other DNA
  misc_feature 25..26: note = DNA
  misc_feature order(1..24,27..32): note = RNA
  modified_base 24: mod_base = OTHER; note = 2-Prime-O-Methoxyethyl modified 5-methyl Uridine
  modified_base 25: mod_base = OTHER; note = DNA nucleotide carrying a 6-amino-5-nitro-3-yl-2(1H)-pyridone nucleobase
  modified_base order(7..9,14..15,19..20,23,28): mod_base = OTHER; note = 2-Prime-Fluoro modified nucleoside
  modified_base order(1..6,10..13,16..18,21..22,27,29..32): mod_base = OTHER; note = 2-Prime-O-Methyl modified nucleoside
  modified_base order(1^2,31^32): mod_base = OTHER; note = (1,3-dimethylimidazolidin-2-ylidene) Phosphoramidate linkage
  modified_base order(2..26,27..31): mod_base = OTHER; note = Phosphorothioate linkage
  modified_base 26^27: mod_base = OTHER; note = Methylphosphonate linkage
  misc_feature 1..32: note = RM114751

SEQ ID NO: 107 - DNA, 32 bp, synthetic construct; identical to SEQ ID NO: 75
  source 1..32: mol_type = other DNA
  misc_feature 22..23: note = DNA
  misc_feature order(1..21,24..32): note = RNA
  modified_base 21: mod_base = OTHER; note = 2-Prime-O-Methoxyethyl modified 5-methyl Uridine
  modified_base 22: mod_base = OTHER; note = DNA nucleotide carrying a 6-amino-5-nitro-3-yl-2(1H)-pyridone nucleobase
  modified_base order(4..6,11..12,16..17,20,25): mod_base = OTHER; note = 2-Prime-Fluoro modified nucleoside
  modified_base order(1..3,7..10,13..15,18..19,24,26..32): mod_base = OTHER; note = 2-Prime-O-Methyl modified nucleoside
  modified_base order(1^2,31^32): mod_base = OTHER; note = (1,3-dimethylimidazolidin-2-ylidene) Phosphoramidate linkage
  modified_base order(2..23,24..31): mod_base = OTHER; note = Phosphorothioate linkage
  modified_base 23^24: mod_base = OTHER; note = Methylphosphonate linkage
  misc_feature 1..32: note = RM114752

SEQ ID NO: 108 - DNA, 32 bp, synthetic construct; identical to SEQ ID NO: 76
  source 1..32: mol_type = other DNA
  misc_feature 19..20: note = DNA
  misc_feature order(1..18,21..32): note = RNA
  modified_base 18: mod_base = OTHER; note = 2-Prime-O-Methoxyethyl modified 5-methyl Uridine
  modified_base 19: mod_base = OTHER; note = DNA nucleotide carrying a 6-amino-5-nitro-3-yl-2(1H)-pyridone nucleobase
  modified_base order(1..3,8..9,13..14,17,22): mod_base = OTHER; note = 2-Prime-Fluoro modified nucleoside
  modified_base order(4..7,10..12,15..16,21,23..32): mod_base = OTHER; note = 2-Prime-O-Methyl modified nucleoside
  modified_base order(1^2,31^32): mod_base = OTHER; note = (1,3-dimethylimidazolidin-2-ylidene) Phosphoramidate linkage
  modified_base order(2..20,21..31): mod_base = OTHER; note = Phosphorothioate linkage
  modified_base 20^21: mod_base = OTHER; note = Methylphosphonate linkage
  misc_feature 1..32: note = RM114753

SEQ ID NO: 109 - DNA, 26 bp, synthetic construct
  source 1..26: mol_type = other DNA
  misc_feature 13..14: note = DNA
  misc_feature order(1..12,15..26): note = RNA
  modified_base 12: mod_base = OTHER; note = 2-Prime-O-Methoxyethyl modified 5-methyl Uridine
  modified_base 13: mod_base = OTHER; note = DNA nucleotide carrying a 6-amino-5-nitro-3-yl-2(1H)-pyridone nucleobase
  modified_base order(2,4,6,16,22,24,26): mod_base = OTHER; note = 2-Prime-Fluoro modified nucleoside
  modified_base order(1,3,5,7..11,15,17..21,23,25): mod_base = OTHER; note = 2-Prime-O-Methyl modified nucleoside
  modified_base order(1^2,25^26): mod_base = OTHER; note = (1,3-dimethylimidazolidin-2-ylidene) Phosphoramidate linkage
  modified_base order(2..14,15..25): mod_base = OTHER; note = Phosphorothioate linkage
  modified_base 14^15: mod_base = OTHER; note = Methylphosphonate linkage
  misc_feature 1..26: note = RM114754
ggcccttcgtctnatggacaaagtct

SEQ ID NO: 110 - DNA, 29 bp, synthetic construct
  source 1..29: mol_type = other DNA
  misc_feature 18..19: note = DNA
  misc_feature order(1..17,20..29): note = RNA
  modified_base 17: mod_base = OTHER; note = 2-Prime-O-Methoxyethyl modified 5-methyl Uridine
  modified_base 18: mod_base = OTHER; note = DNA nucleotide carrying a 6-amino-5-nitro-3-yl-2(1H)-pyridone nucleobase
  modified_base order(8,11,14..15,21,26..28): mod_base = OTHER; note = 2-Prime-Fluoro modified nucleoside
  modified_base order(1..7,9..10,12..13,16,20,22..25,29): mod_base = OTHER; note = 2-Prime-O-Methyl modified nucleoside
  modified_base order(1^2,28^29): mod_base = OTHER; note = (1,3-dimethylimidazolidin-2-ylidene) Phosphoramidate linkage
  modified_base order(2..19,20..28): mod_base = OTHER; note = Phosphorothioate linkage
  modified_base 19^20: mod_base = OTHER; note = Methylphosphonate linkage
  misc_feature 1..29: note = RM114755
aatttggcccttcgtctnatggacaaagt

SEQ ID NO: 111 - DNA, 29 bp, synthetic construct
  source 1..29: mol_type = other DNA
  misc_feature 15..16: note = DNA
  misc_feature order(1..14,17..29): note = RNA
  modified_base 14: mod_base = OTHER; note = 2-Prime-O-Methoxyethyl modified 5-methyl Uridine
  modified_base 15: mod_base = OTHER; note = DNA nucleotide carrying a 6-amino-5-nitro-3-yl-2(1H)-pyridone nucleobase
  modified_base order(5,8,11..12,18,23..25): mod_base = OTHER; note = 2-Prime-Fluoro modified nucleoside
  modified_base order(1..4,6..7,9..10,13,17,19..22,26..29): mod_base = OTHER; note = 2-Prime-O-Methyl modified nucleoside
  modified_base order(1^2,28^29): mod_base = OTHER; note = (1,3-dimethylimidazolidin-2-ylidene) Phosphoramidate linkage
  modified_base order(2..16,17..28): mod_base = OTHER; note = Phosphorothioate linkage
  modified_base 16^17: mod_base = OTHER; note = Methylphosphonate linkage
  misc_feature 1..29: note = RM114756
ttggcccttcgtctnatggacaaagtctt

SEQ ID NO: 112 - DNA, 29 bp, synthetic construct
  source 1..29: mol_type = other DNA
  misc_feature 12..13: note = DNA
  misc_feature order(1..11,14..29): note = RNA
  modified_base 11: mod_base = OTHER; note = 2-Prime-O-Methoxyethyl modified 5-methyl Uridine
  modified_base 12: mod_base = OTHER; note = DNA nucleotide carrying a 6-amino-5-nitro-3-yl-2(1H)-pyridone nucleobase
  modified_base order(2,5,8..9,15,20..22): mod_base = OTHER; note = 2-Prime-Fluoro modified nucleoside
  modified_base order(1,3..4,6..7,10,14,16..19,23..29): mod_base = OTHER; note = 2-Prime-O-Methyl modified nucleoside
  modified_base order(1^2,28^29): mod_base = OTHER; note = (1,3-dimethylimidazolidin-2-ylidene) Phosphoramidate linkage
  modified_base order(2..13,14..28): mod_base = OTHER; note = Phosphorothioate linkage
  modified_base 13^14: mod_base = OTHER; note = Methylphosphonate linkage
  misc_feature 1..29: note = RM114757
gcccttcgtctnatggacaaagtctttaa

SEQ ID NO: 113 - DNA, 26 bp, synthetic construct
  source 1..26: mol_type = other DNA
  misc_feature 19..20: note = DNA
  misc_feature order(1..18,21..26): note = RNA
  modified_base 18: mod_base = OTHER; note = 2-Prime-O-Methoxyethyl modified 5-methyl Uridine
  modified_base 19: mod_base = OTHER; note = DNA nucleotide carrying a 6-amino-5-nitro-3-yl-2(1H)-pyridone nucleobase
  modified_base order(5,9,11,13,16,22,25): mod_base = OTHER; note = 2-Prime-Fluoro modified nucleoside
  modified_base order(1..4,6..8,10,12,14..15,17,21,23..24,26): mod_base = OTHER; note = 2-Prime-O-Methyl modified nucleoside
  modified_base order(1^2,25^26): mod_base = OTHER; note = (1,3-dimethylimidazolidin-2-ylidene) Phosphoramidate linkage
  modified_base order(2..20,21..25): mod_base = OTHER; note = Phosphorothioate linkage
  modified_base 20^21: mod_base = OTHER; note = Methylphosphonate linkage
  misc_feature 1..26: note = RM114758
taatttggcccttcgtctnatggaca

SEQ ID NO: 114 - DNA, 26 bp, synthetic construct
  source 1..26: mol_type = other DNA
  misc_feature 16..17: note = DNA
  misc_feature order(1..15,18..26): note = RNA
  modified_base 15: mod_base = OTHER; note = 2-Prime-O-Methoxyethyl modified 5-methyl Uridine
  modified_base 16: mod_base = OTHER; note = DNA nucleotide carrying a 6-amino-5-nitro-3-yl-2(1H)-pyridone nucleobase
  modified_base order(2,6,8,10,13,19,22): mod_base = OTHER; note = 2-Prime-Fluoro modified nucleoside
  modified_base order(1,3..5,7,9,11..12,14,18,20..21,23..26): mod_base = OTHER; note = 2-Prime-O-Methyl modified nucleoside
  modified_base order(1^2,25^26): mod_base = OTHER; note = (1,3-dimethylimidazolidin-2-ylidene) Phosphoramidate linkage
  modified_base order(2..17,18..25): mod_base = OTHER; note = Phosphorothioate linkage
  modified_base 17^18: mod_base = OTHER; note = Methylphosphonate linkage
  misc_feature 1..26: note = RM114759
tttggcccttcgtctnatggacaaag

SEQ ID NO: 115 - DNA, 26 bp, synthetic construct
  source 1..26: mol_type = other DNA
  misc_feature 10..11: note = DNA
  misc_feature order(1..9,12..26): note = RNA
  modified_base 9: mod_base = OTHER; note = 2-Prime-O-Methoxyethyl modified 5-methyl Uridine
  modified_base 10: mod_base = OTHER; note = DNA nucleotide carrying a 6-amino-5-nitro-3-yl-2(1H)-pyridone nucleobase
  modified_base order(6,13,15,18,20,22,26): mod_base = OTHER; note = 2-Prime-Fluoro modified nucleoside
  modified_base order(1..5,7..8,12,14,16..17,19,21,23..25): mod_base = OTHER; note = 2-Prime-O-Methyl modified nucleoside
  modified_base order(1^2,25^26): mod_base = OTHER; note = (1,3-dimethylimidazolidin-2-ylidene) Phosphoramidate linkage
  modified_base order(2..11,12..25): mod_base = OTHER; note = Phosphorothioate linkage
  modified_base 11^12: mod_base = OTHER; note = Methylphosphonate linkage
  misc_feature 1..26: note = RM114760
ccttcgtctnatggacaaagtcttta

SEQ ID NO: 116 - DNA, 26 bp, synthetic construct
  source 1..26: mol_type = other DNA
  misc_feature 7..8: note = DNA
  misc_feature order(1..6,9..26): note = RNA
  modified_base 6: mod_base = OTHER; note = 2-Prime-O-Methoxyethyl modified 5-methyl Uridine
  modified_base 7: mod_base = OTHER; note = DNA nucleotide carrying a 6-amino-5-nitro-3-yl-2(1H)-pyridone nucleobase
  modified_base order(3,10,12,15,17,19,23): mod_base = OTHER; note = 2-Prime-Fluoro modified nucleoside
  modified_base order(1..2,4..5,9,11,13..14,16,18,20..22,24..26): mod_base = OTHER; note = 2-Prime-O-Methyl modified nucleoside
  modified_base order(1^2,25^26): mod_base = OTHER; note = (1,3-dimethylimidazolidin-2-ylidene) Phosphoramidate linkage
  modified_base order(2..8,9..25): mod_base = OTHER; note = Phosphorothioate linkage
  modified_base 8^9: mod_base = OTHER; note = Methylphosphonate linkage
  misc_feature 1..26: note = RM114761
tcgtctnatggacaaagtctttaaga

SEQ ID NO: 117 - DNA, 26 bp, synthetic construct
  source 1..26: mol_type = other DNA
  misc_feature 19..20: note = DNA
  misc_feature order(1..18,21..26): note = RNA
  modified_base 18: mod_base = OTHER; note = 2-Prime-O-Methoxyethyl modified 5-methyl Uridine
  modified_base 19: mod_base = OTHER; note = DNA nucleotide carrying a 6-amino-5-nitro-3-yl-2(1H)-pyridone nucleobase
  modified_base order(11,13,16,22,25): mod_base = OTHER; note = 2-Prime-Fluoro modified nucleoside
  modified_base order(1..10,12,14..15,17,21,23..24,26): mod_base = OTHER; note = 2-Prime-O-Methyl modified nucleoside
  modified_base order(1^2,25^26): mod_base = OTHER; note = (1,3-dimethylimidazolidin-2-ylidene) Phosphoramidate linkage
  modified_base order(2..20,21..25): mod_base = OTHER; note = Phosphorothioate linkage
  modified_base 20^21: mod_base = OTHER; note = Methylphosphonate linkage
  misc_feature 1..26: note = RM114762
taatttggcccttcgtctnatggaca

SEQ ID NO: 118 - DNA, 26 bp, synthetic construct
  source 1..26: mol_type = other DNA
  misc_feature 16..17: note = DNA
  misc_feature order(1..15,18..26): note = RNA
  modified_base 15: mod_base = OTHER; note = 2-Prime-O-Methoxyethyl modified 5-methyl Uridine
  modified_base 16: mod_base = OTHER; note = DNA nucleotide carrying a 6-amino-5-nitro-3-yl-2(1H)-pyridone nucleobase
  modified_base order(8,10,13,19,22): mod_base = OTHER; note = 2-Prime-Fluoro modified nucleoside
  modified_base order(1..7,9,11..12,14,18,20..21,23..26): mod_base = OTHER; note = 2-Prime-O-Methyl modified nucleoside
  modified_base order(1^2,25^26): mod_base = OTHER; note = (1,3-dimethylimidazolidin-2-ylidene) Phosphoramidate linkage
  modified_base order(2..17,18..25): mod_base = OTHER; note = Phosphorothioate linkage
  modified_base 17^18: mod_base = OTHER; note = Methylphosphonate linkage
  misc_feature 1..26: note = RM114763
tttggcccttcgtctnatggacaaag

SEQ ID NO: 119 - DNA, 26 bp, synthetic construct
  source 1..26: mol_type = other DNA
  misc_feature 13..14: note = DNA
  misc_feature order(1..12,15..26): note = RNA
  modified_base 12: mod_base = OTHER; note = 2-Prime-O-Methoxyethyl modified 5-methyl Uridine
  modified_base 13: mod_base = OTHER; note = DNA nucleotide carrying a 6-amino-5-nitro-3-yl-2(1H)-pyridone nucleobase
  modified_base order(5,7,10,16,19): mod_base = OTHER; note = 2-Prime-Fluoro modified nucleoside
  modified_base order(1..4,6,8..9,11,15,17..18,20..26): mod_base = OTHER; note = 2-Prime-O-Methyl modified nucleoside
  modified_base order(1^2,25^26): mod_base = OTHER; note = (1,3-dimethylimidazolidin-2-ylidene) Phosphoramidate linkage
  modified_base order(2..14,15..25): mod_base = OTHER; note = Phosphorothioate linkage
  modified_base 14^15: mod_base = OTHER; note = Methylphosphonate linkage
  misc_feature 1..26: note = RM114764
ggcccttcgtctnatggacaaagtct

SEQ ID NO: 120 - DNA, 26 bp, synthetic construct
  source 1..26: mol_type = other DNA
  misc_feature 10..11: note = DNA
  misc_feature order(1..9,12..26): note = RNA
  modified_base 9: mod_base = OTHER; note = 2-Prime-O-Methoxyethyl modified 5-methyl Uridine
  modified_base 10: mod_base = OTHER; note = DNA nucleotide carrying a 6-amino-5-nitro-3-yl-2(1H)-pyridone nucleobase
  modified_base order(2,4,7,13,16): mod_base = OTHER; note = 2-Prime-Fluoro modified nucleoside
  modified_base order(1,3,5..6,8,12,14..15,17..26): mod_base = OTHER; note = 2-Prime-O-Methyl modified nucleoside
  modified_base order(1^2,25^26): mod_base = OTHER; note = (1,3-dimethylimidazolidin-2-ylidene) Phosphoramidate linkage
  modified_base order(2..11,12..25): mod_base = OTHER; note = Phosphorothioate linkage
  modified_base 11^12: mod_base = OTHER; note = Methylphosphonate linkage
  misc_feature 1..26: note = RM114765
ccttcgtctnatggacaaagtcttta

SEQ ID NO: 121 - DNA, 29 bp, synthetic construct
  source 1..29: mol_type = other DNA
  misc_feature 21..22: note = DNA
  misc_feature order(1..20,23..29): note = RNA
  modified_base 20: mod_base = OTHER; note = 2-Prime-O-Methoxyethyl modified 5-methyl Uridine
  modified_base 21: mod_base = OTHER; note = DNA nucleotide carrying a 6-amino-5-nitro-3-yl-2(1H)-pyridone nucleobase
  modified_base order(13,15,18,24,27): mod_base = OTHER; note = 2-Prime-Fluoro modified nucleoside
  modified_base order(1..12,14,16..17,19,23,25..26,28..29): mod_base = OTHER; note = 2-Prime-O-Methyl modified nucleoside
  modified_base order(1^2,28^29): mod_base = OTHER; note = (1,3-dimethylimidazolidin-2-ylidene) Phosphoramidate linkage
  modified_base order(2..22,23..28): mod_base = OTHER; note = Phosphorothioate linkage
  modified_base 22^23: mod_base = OTHER; note = Methylphosphonate linkage
  misc_feature 1..29: note = RM114766
attaatttggcccttcgtctnatggacaa

SEQ ID NO: 122 - DNA, 29 bp, synthetic construct
  source 1..29: mol_type = other DNA
  misc_feature 18..19: note = DNA
  misc_feature order(1..17,20..29): note = RNA
  modified_base 17: mod_base = OTHER; note = 2-Prime-O-Methoxyethyl modified 5-methyl Uridine
  modified_base 18: mod_base = OTHER; note = DNA nucleotide carrying a 6-amino-5-nitro-3-yl-2(1H)-pyridone nucleobase
  modified_base order(10,12,15,21,24): mod_base = OTHER; note = 2-Prime-Fluoro modified nucleoside
  modified_base order(1..9,11,13..14,16,20,22..23,25..29): mod_base = OTHER; note = 2-Prime-O-Methyl modified nucleoside
  modified_base order(1^2,28^29): mod_base = OTHER; note = (1,3-dimethylimidazolidin-2-ylidene) Phosphoramidate linkage
  modified_base order(2..19,20..28): mod_base = OTHER; note = Phosphorothioate linkage
  modified_base 19^20: mod_base = OTHER; note = Methylphosphonate linkage
  misc_feature 1..29: note = RM114767
aatttggcccttcgtctnatggacaaagt

SEQ ID NO: 123 - DNA, 29 bp, synthetic construct
  source 1..29: mol_type = other DNA
  misc_feature 15..16: note = DNA
  misc_feature order(1..14,17..29): note = RNA
  modified_base 14: mod_base = OTHER; note = 2-Prime-O-Methoxyethyl modified 5-methyl Uridine
  modified_base 15: mod_base = OTHER; note = DNA nucleotide carrying a 6-amino-5-nitro-3-yl-2(1H)-pyridone nucleobase
  modified_base order(7,9,12,18,21): mod_base = OTHER; note = 2-Prime-Fluoro modified nucleoside
  modified_base order(1..6,8,10..11,13,17,19..20,22..29): mod_base = OTHER; note = 2-Prime-O-Methyl modified nucleoside
  modified_base order(1^2,28^29): mod_base = OTHER; note = (1,3-dimethylimidazolidin-2-ylidene) Phosphoramidate linkage
  modified_base order(2..16,17..28): mod_base = OTHER; note = Phosphorothioate linkage
  modified_base 16^17: mod_base = OTHER; note = Methylphosphonate linkage
  misc_feature 1..29: note = RM114768
ttggcccttcgtctnatggacaaagtctt

SEQ ID NO: 124 - DNA, 29 bp, synthetic construct
  source 1..29: mol_type = other DNA
  misc_feature 12..13: note = DNA
  misc_feature order(1..11,14..29): note = RNA
  modified_base 11: mod_base = OTHER; note = 2-Prime-O-Methoxyethyl modified 5-methyl Uridine
  modified_base 12: mod_base = OTHER; note = DNA nucleotide carrying a 6-amino-5-nitro-3-yl-2(1H)-pyridone nucleobase
  modified_base order(4,6,9,15,18): mod_base = OTHER; note = 2-Prime-Fluoro modified nucleoside
  modified_base order(1..3,5,7..8,10,14,16..17,19..29): mod_base = OTHER; note = 2-Prime-O-Methyl modified nucleoside
  modified_base order(1^2,28^29): mod_base = OTHER; note = (1,3-dimethylimidazolidin-2-ylidene) Phosphoramidate linkage
  modified_base order(2..13,14..28): mod_base = OTHER; note = Phosphorothioate linkage
  modified_base 13^14: mod_base = OTHER; note = Methylphosphonate linkage
  misc_feature 1..29: note = RM114769
gcccttcgtctnatggacaaagtctttaa

SEQ ID NO: 125 - DNA, 29 bp, synthetic construct
  source 1..29: mol_type = other DNA
  misc_feature 9..10: note = DNA
  misc_feature order(1..8,11..29): note = RNA
  modified_base 8: mod_base = OTHER; note = 2-Prime-O-Methoxyethyl modified 5-methyl Uridine
  modified_base 9: mod_base = OTHER; note = DNA nucleotide carrying a 6-amino-5-nitro-3-yl-2(1H)-pyridone nucleobase
  modified_base order(1,3,6,12,15): mod_base = OTHER; note = 2-Prime-Fluoro modified nucleoside
  modified_base order(2,4..5,7,11,13..14,16..29): mod_base = OTHER; note = 2-Prime-O-Methyl modified nucleoside
  modified_base order(1^2,28^29): mod_base = OTHER; note = (1,3-dimethylimidazolidin-2-ylidene) Phosphoramidate linkage
  modified_base order(2..10,11..28): mod_base = OTHER; note = Phosphorothioate linkage
  modified_base 10^11: mod_base = OTHER; note = Methylphosphonate linkage
  misc_feature 1..29: note = RM114770
cttcgtctnatggacaaagtctttaagac

SEQ ID NO: 126 - DNA, 26 bp, synthetic construct
  source 1..26: mol_type = other DNA
  misc_feature 16..17: note = DNA
  misc_feature order(1..15,18..26): note = RNA
  modified_base 15: mod_base = OTHER; note = 2-Prime-O-Methoxyethyl modified 5-methyl Uridine
  modified_base 16: mod_base = OTHER; note = DNA nucleotide carrying a 6-amino-5-nitro-3-yl-2(1H)-pyridone nucleobase
  modified_base order(12,19,21,24,26): mod_base = OTHER; note = 2-Prime-Fluoro modified nucleoside
  modified_base order(1..11,13..14,18,20,22..23,25): mod_base = OTHER; note = 2-Prime-O-Methyl modified nucleoside
  modified_base order(1^2,25^26): mod_base = OTHER; note = (1,3-dimethylimidazolidin-2-ylidene) Phosphoramidate linkage
  modified_base order(2..17,18..25): mod_base = OTHER; note = Phosphorothioate linkage
  modified_base 17^18: mod_base = OTHER; note = Methylphosphonate linkage
  misc_feature 1..26: note = RM114771
tttggcccttcgtctnatggacaaag

SEQ ID NO: 127 - DNA, 26 bp, synthetic construct
  source 1..26: mol_type = other DNA
  misc_feature 13..14: note = DNA
  misc_feature order(1..12,15..26): note = RNA
  modified_base 12: mod_base = OTHER; note = 2-Prime-O-Methoxyethyl modified 5-methyl Uridine
  modified_base 13: mod_base = OTHER; note = DNA nucleotide carrying a 6-amino-5-nitro-3-yl-2(1H)-pyridone nucleobase
  modified_base order(9,16,18,21,23): mod_base = OTHER; note = 2-Prime-Fluoro modified nucleoside
  modified_base order(1..8,10..11,15,17,19..20,22,24..26): mod_base = OTHER; note = 2-Prime-O-Methyl modified nucleoside
  modified_base order(1^2,25^26): mod_base = OTHER; note = (1,3-dimethylimidazolidin-2-ylidene) Phosphoramidate linkage
  modified_base order(2..14,15..25): mod_base = OTHER; note = Phosphorothioate linkage
  modified_base 14^15: mod_base = OTHER; note = Methylphosphonate linkage
  misc_feature 1..26: note = RM114772
ggcccttcgtctnatggacaaagtct

SEQ ID NO: 128 - DNA, 26 bp, synthetic construct
  source 1..26: mol_type = other DNA
  misc_feature 10..11: note = DNA
  misc_feature order(1..9,12..26): note = RNA
  modified_base 9: mod_base = OTHER; note = 2-Prime-O-Methoxyethyl modified 5-methyl Uridine
  modified_base 10: mod_base = OTHER; note = DNA nucleotide carrying a 6-amino-5-nitro-3-yl-2(1H)-pyridone nucleobase
  modified_base order(6,13,15,18,20): mod_base = OTHER; note = 2-Prime-Fluoro modified nucleoside
  modified_base order(1..5,7..8,12,14,16..17,19,21..26): mod_base = OTHER; note = 2-Prime-O-Methyl modified nucleoside
  modified_base order(1^2,25^26): mod_base = OTHER; note = (1,3-dimethylimidazolidin-2-ylidene) Phosphoramidate linkage
  modified_base order(2..11,12..25): mod_base = OTHER; note = Phosphorothioate linkage
  modified_base 11^12: mod_base = OTHER; note = Methylphosphonate linkage
  misc_feature 1..26: note = RM114773
ccttcgtctnatggacaaagtcttta

SEQ ID NO: 129 - DNA, 26 bp, synthetic construct
  source 1..26: mol_type = other DNA
  misc_feature 7..8: note = DNA
  misc_feature order(1..6,9..26): note = RNA
  modified_base 6: mod_base = OTHER; note = 2-Prime-O-Methoxyethyl modified 5-methyl Uridine
  modified_base 7: mod_base = OTHER; note = DNA nucleotide carrying a 6-amino-5-nitro-3-yl-2(1H)-pyridone nucleobase
  modified_base order(3,10,12,15,17): mod_base = OTHER; note = 2-Prime-Fluoro modified nucleoside
  modified_base order(1..2,4..5,9,11,13..14,16,18..26): mod_base = OTHER; note = 2-Prime-O-Methyl modified nucleoside
  modified_base order(1^2,25^26): mod_base = OTHER; note = (1,3-dimethylimidazolidin-2-ylidene) Phosphoramidate linkage
  modified_base order(2..8,9..25): mod_base = OTHER; note = Phosphorothioate linkage
  modified_base 8^9: mod_base = OTHER; note = Methylphosphonate linkage
  misc_feature 1..26: note = RM114774
tcgtctnatggacaaagtctttaaga

SEQ ID NO: 130 - DNA, 29 bp, synthetic construct
  source 1..29: mol_type = other DNA
  misc_feature 18..19: note = DNA
  misc_feature order(1..17,20..29): note = RNA
  modified_base 17: mod_base = OTHER; note = 2-Prime-O-Methoxyethyl modified 5-methyl Uridine
  modified_base 18: mod_base = OTHER; note = DNA nucleotide carrying a 6-amino-5-nitro-3-yl-2(1H)-pyridone nucleobase
  modified_base order(14,21,23,26,28): mod_base = OTHER; note = 2-Prime-Fluoro modified nucleoside
  modified_base order(1..13,15..16,20,22,24..25,27,29): mod_base = OTHER; note = 2-Prime-O-Methyl modified nucleoside
  modified_base order(1^2,28^29): mod_base = OTHER; note = (1,3-dimethylimidazolidin-2-ylidene) Phosphoramidate linkage
  modified_base order(2..19,20..28): mod_base = OTHER; note = Phosphorothioate linkage
  modified_base 19^20: mod_base = OTHER; note = Methylphosphonate linkage
  misc_feature 1..29: note = RM114775
aatttggcccttcgtctnatggacaaagt

SEQ ID NO: 131 - DNA, 29 bp, synthetic construct
  source 1..29: mol_type = other DNA
  misc_feature 15..16: note = DNA
  misc_feature order(1..14,17..29): note = RNA
  modified_base 14: mod_base = OTHER; note = 2-Prime-O-Methoxyethyl modified 5-methyl Uridine
  modified_base 15: mod_base = OTHER; note = DNA nucleotide carrying a 6-amino-5-nitro-3-yl-2(1H)-pyridone nucleobase
  modified_base order(11,18,20,23,25): mod_base = OTHER; note = 2-Prime-Fluoro modified nucleoside
  modified_base order(1..10,12..13,17,19,21..22,24,26..29): mod_base = OTHER; note = 2-Prime-O-Methyl modified nucleoside
  modified_base order(1^2,28^29): mod_base = OTHER; note = (1,3-dimethylimidazolidin-2-ylidene) Phosphoramidate linkage
  modified_base order(2..16,17..28): mod_base = OTHER; note = Phosphorothioate linkage
  modified_base 16^17: mod_base = OTHER; note = Methylphosphonate linkage
  misc_feature 1..29: note = RM114776
ttggcccttcgtctnatggacaaagtctt

SEQ ID NO: 132 - DNA, 29 bp, synthetic construct
  source 1..29: mol_type = other DNA
  misc_feature 12..13: note = DNA
  misc_feature order(1..11,14..29): note = RNA
  modified_base 11: mod_base = OTHER; note = 2-Prime-O-Methoxyethyl modified 5-methyl Uridine
  modified_base 12: mod_base = OTHER; note = DNA nucleotide carrying a 6-amino-5-nitro-3-yl-2(1H)-pyridone nucleobase
  modified_base order(8,15,17,20,22): mod_base = OTHER; note = 2-Prime-Fluoro modified nucleoside
  modified_base order(1..7,9..10,14,16,18..19,21,23..29): mod_base = OTHER; note = 2-Prime-O-Methyl modified nucleoside
  modified_base order(1^2,28^29): mod_base = OTHER; note = (1,3-dimethylimidazolidin-2-ylidene) Phosphoramidate linkage
  modified_base order(2..13,14..28): mod_base = OTHER; note = Phosphorothioate linkage
  modified_base 13^14: mod_base = OTHER; note = Methylphosphonate linkage
  misc_feature 1..29: note = RM114777
gcccttcgtctnatggacaaagtctttaa

SEQ ID NO: 133 - DNA, 29 bp, synthetic construct
  source 1..29: mol_type = other DNA
  misc_feature 9..10: note = DNA
  misc_feature order(1..8,11..29): note = RNA
  modified_base 8: mod_base = OTHER; note = 2-Prime-O-Methoxyethyl modified 5-methyl Uridine
  modified_base 9: mod_base = OTHER; note = DNA nucleotide carrying a 6-amino-5-nitro-3-yl-2(1H)-pyridone nucleobase
  modified_base order(5,12,14,17,19): mod_base = OTHER; note = 2-Prime-Fluoro modified nucleoside
  modified_base order(1..4,6..7,11,13,15..16,18,20..29): mod_base = OTHER; note = 2-Prime-O-Methyl modified nucleoside
  modified_base order(1^2,28^29): mod_base = OTHER; note = (1,3-dimethylimidazolidin-2-ylidene) Phosphoramidate linkage
  modified_base order(2..10,11..28): mod_base = OTHER; note = Phosphorothioate linkage
  modified_base 10^11: mod_base = OTHER; note = Methylphosphonate linkage
  misc_feature 1..29: note = RM114778
cttcgtctnatggacaaagtctttaagac

SEQ ID NO: 134 - DNA, 29 bp, synthetic construct
  source 1..29: mol_type = other DNA
  misc_feature 6..7: note = DNA
  misc_feature order(1..5,8..29): note = RNA
  modified_base 5: mod_base = OTHER; note = 2-Prime-O-Methoxyethyl modified 5-methyl Uridine
  modified_base 6: mod_base = OTHER; note = DNA nucleotide carrying a 6-amino-5-nitro-3-yl-2(1H)-pyridone nucleobase
  modified_base order(2,9,11,14,16): mod_base = OTHER; note = 2-Prime-Fluoro modified nucleoside
  modified_base order(1,3..4,8,10,12..13,15,17..29): mod_base = OTHER; note = 2-Prime-O-Methyl modified nucleoside
  modified_base order(1^2,28^29): mod_base = OTHER; note = (1,3-dimethylimidazolidin-2-ylidene) Phosphoramidate linkage
  modified_base order(2..7,8..28): mod_base = OTHER; note = Phosphorothioate linkage
  modified_base 7^8: mod_base = OTHER; note = Methylphosphonate linkage
  misc_feature 1..29: note = RM114779
cgtctnatggacaaagtctttaagaccat

SEQ ID NO: 135 - DNA, 23 bp, synthetic construct
  source 1..23: mol_type = other DNA
  misc_feature 18..19: note = DNA
  misc_feature order(1..17,20..23): note = RNA
  modified_base 17: mod_base = OTHER; note = 2-Prime-O-Methoxyethyl modified 5-methyl Uridine
  modified_base 18: mod_base = OTHER; note = DNA nucleotide carrying a 6-amino-5-nitro-3-yl-2(1H)-pyridone nucleobase
  modified_base order(15,21): mod_base = OTHER; note = 2-Prime-Fluoro modified nucleoside
  modified_base order(1..14,16,20,22..23): mod_base = OTHER; note = 2-Prime-O-Methyl modified nucleoside
  modified_base order(1^2,22^23): mod_base = OTHER; note = (1,3-dimethylimidazolidin-2-ylidene) Phosphoramidate linkage
  modified_base order(2..19,20..22): mod_base = OTHER; note = Phosphorothioate linkage
  modified_base 19^20: mod_base = OTHER; note = Methylphosphonate linkage
  misc_feature 1..23: note = RM114780
aatttggcccttcgtctnatgga

SEQ ID NO: 136 - DNA, 23 bp, synthetic construct
  source 1..23: mol_type = other DNA
  misc_feature 15..16: note = DNA
  misc_feature order(1..14,17..23): note = RNA
  modified_base 14: mod_base = OTHER; note = 2-Prime-O-Methoxyethyl modified 5-methyl Uridine
  modified_base 15: mod_base = OTHER; note = DNA nucleotide carrying a 6-amino-5-nitro-3-yl-2(1H)-pyridone nucleobase
  modified_base order(12,18): mod_base = OTHER; note = 2-Prime-Fluoro modified nucleoside
  modified_base order(1..11,13,17,19..23): mod_base = OTHER; note = 2-Prime-O-Methyl modified nucleoside
  modified_base order(1^2,22^23): mod_base = OTHER; note = (1,3-dimethylimidazolidin-2-ylidene) Phosphoramidate linkage
  modified_base order(2..16,17..22): mod_base = OTHER; note = Phosphorothioate linkage
  modified_base 16^17: mod_base = OTHER; note = Methylphosphonate linkage
  misc_feature 1..23: note = RM114781
ttggcccttcgtctnatggacaa

SEQ ID NO: 137 - DNA, 23 bp, synthetic construct
  source 1..23: mol_type = other DNA
  misc_feature 12..13: note = DNA
  misc_feature order(1..11,14..23): note = RNA
  modified_base 11: mod_base = OTHER; note = 2-Prime-O-Methoxyethyl modified 5-methyl Uridine
  modified_base 12: mod_base = OTHER; note = DNA nucleotide carrying a 6-amino-5-nitro-3-yl-2(1H)-pyridone nucleobase
  modified_base order(9,15): mod_base = OTHER; note = 2-Prime-Fluoro modified nucleoside
  modified_base order(1..8,10,14,16..23): mod_base = OTHER; note = 2-Prime-O-Methyl modified nucleoside
  modified_base order(1^2,22^23): mod_base = OTHER; note = (1,3-dimethylimidazolidin-2-ylidene) Phosphoramidate linkage
  modified_base order(2..13,14..22): mod_base = OTHER; note = Phosphorothioate linkage
  modified_base 13^14: mod_base = OTHER; note = Methylphosphonate linkage
  misc_feature 1..23: note = RM114782
gcccttcgtctnatggacaaagt

SEQ ID NO: 138 - DNA, 23 bp, synthetic construct
  source 1..23: mol_type = other DNA
  misc_feature 9..10: note = DNA
  misc_feature order(1..8,11..23): note = RNA
  modified_base 8: mod_base = OTHER; note = 2-Prime-O-Methoxyethyl modified 5-methyl Uridine
  modified_base 9: mod_base = OTHER; note = DNA nucleotide carrying a 6-amino-5-nitro-3-yl-2(1H)-pyridone nucleobase
  modified_base order(6,12): mod_base = OTHER; note = 2-Prime-Fluoro modified nucleoside
  modified_base order(1..5,7,11,13..23): mod_base = OTHER; note = 2-Prime-O-Methyl modified nucleoside
  modified_base order(1^2,22^23): mod_base = OTHER; note = (1,3-dimethylimidazolidin-2-ylidene) Phosphoramidate linkage
  modified_base order(2..10,11..22): mod_base = OTHER; note = Phosphorothioate linkage
  modified_base 10^11: mod_base = OTHER; note = Methylphosphonate linkage
  misc_feature 1..23: note = RM114783
cttcgtctnatggacaaagtctt

SEQ ID NO: 139 - DNA, 23 bp, synthetic construct
  source 1..23: mol_type = other DNA
  misc_feature 6..7: note = DNA
  misc_feature order(1..5,8..23): note = RNA
  modified_base 5: mod_base = OTHER; note = 2-Prime-O-Methoxyethyl modified 5-methyl Uridine
  modified_base 6: mod_base = OTHER; note = DNA nucleotide carrying a 6-amino-5-nitro-3-yl-2(1H)-pyridone nucleobase
  modified_base order(3,9): mod_base = OTHER; note = 2-Prime-Fluoro modified nucleoside
  modified_base order(1..2,4,8,10..23): mod_base = OTHER; note = 2-Prime-O-Methyl modified nucleoside
  modified_base order(1^2,22^23): mod_base = OTHER; note = (1,3-dimethylimidazolidin-2-ylidene) Phosphoramidate linkage
  modified_base order(2..7,8..22): mod_base = OTHER; note = Phosphorothioate linkage
  modified_base 7^8: mod_base = OTHER; note = Methylphosphonate linkage
  misc_feature 1..23: note = RM114784
cgtctnatggacaaagtctttaa

SEQ ID NO: 140 - DNA, 26 bp, synthetic construct
  source 1..26: mol_type = other DNA
  misc_feature 22..23: note = DNA
  misc_feature order(1..21,24..26): note = RNA
  modified_base 21: mod_base = OTHER; note = 2-Prime-O-Methoxyethyl modified 5-methyl Uridine
  modified_base 22: mod_base = OTHER; note = DNA nucleotide carrying a 6-amino-5-nitro-3-yl-2(1H)-pyridone nucleobase
  modified_base order(19,25): mod_base = OTHER; note = 2-Prime-Fluoro modified nucleoside
  modified_base order(1..18,20,24,26): mod_base = OTHER; note = 2-Prime-O-Methyl modified nucleoside
  modified_base order(1^2,25^26): mod_base = OTHER; note = (1,3-dimethylimidazolidin-2-ylidene) Phosphoramidate linkage
  modified_base order(2..23,24^25): mod_base = OTHER; note = Phosphorothioate linkage
  modified_base 23^24: mod_base = OTHER; note = Methylphosphonate linkage
  misc_feature 1..26: note = RM114785
cattaatttggcccttcgtctnatgg

SEQ ID NO: 141 - DNA, 26 bp, synthetic construct
  source 1..26: mol_type = other DNA
  misc_feature 19..20: note = DNA
  misc_feature order(1..18,21..26): note = RNA
  modified_base 18: mod_base = OTHER; note = 2-Prime-O-Methoxyethyl modified 5-methyl Uridine
  modified_base 19: mod_base = OTHER; note = DNA nucleotide carrying a 6-amino-5-nitro-3-yl-2(1H)-pyridone nucleobase
  modified_base order(16,22): mod_base = OTHER; note = 2-Prime-Fluoro modified nucleoside
  modified_base order(1..15,17,21,23..26): mod_base = OTHER; note = 2-Prime-O-Methyl modified nucleoside
  modified_base order(1^2,25^26): mod_base = OTHER; note = (1,3-dimethylimidazolidin-2-ylidene) Phosphoramidate linkage
  modified_base order(2..20,21..25): mod_base = OTHER; note = Phosphorothioate linkage
  modified_base 20^21: mod_base = OTHER; note = Methylphosphonate linkage
  misc_feature 1..26: note = RM114786
taatttggcccttcgtctnatggaca

SEQ ID NO: 142 - DNA, 26 bp, synthetic construct
  source 1..26: mol_type = other DNA
  misc_feature 16..17: note = DNA
  misc_feature order(1..15,18..26): note = RNA
  modified_base 15: mod_base = OTHER; note = 2-Prime-O-Methoxyethyl modified 5-methyl Uridine
  modified_base 16: mod_base = OTHER; note = DNA nucleotide carrying a 6-amino-5-nitro-3-yl-2(1H)-pyridone nucleobase
  modified_base order(13,19): mod_base = OTHER; note = 2-Prime-Fluoro modified nucleoside
  modified_base order(1..12,14,18,20..26): mod_base = OTHER; note = 2-Prime-O-Methyl modified nucleoside
  modified_base order(1^2,25^26): mod_base = OTHER; note = (1,3-dimethylimidazolidin-2-ylidene) Phosphoramidate linkage
  modified_base order(2..17,18..25): mod_base = OTHER; note = Phosphorothioate linkage
  modified_base 17^18: mod_base = OTHER; note = Methylphosphonate linkage
  misc_feature 1..26: note = RM114787
tttggcccttcgtctnatggacaaag

SEQ ID NO: 143 - DNA, 26 bp, synthetic construct
  source 1..26: mol_type = other DNA
  misc_feature 13..14: note = DNA
  misc_feature order(1..12,15..26): note = RNA
  modified_base 12: mod_base = OTHER; note = 2-Prime-O-Methoxyethyl modified 5-methyl Uridine
  modified_base 13: mod_base = OTHER; note = DNA nucleotide carrying a 6-amino-5-nitro-3-yl-2(1H)-pyridone nucleobase
  modified_base order(10,16): mod_base = OTHER; note = 2-Prime-Fluoro modified nucleoside
  modified_base order(1..9,11,15,17..26): mod_base = OTHER; note = 2-Prime-O-Methyl modified nucleoside
  modified_base order(1^2,25^26): mod_base = OTHER; note = (1,3-dimethylimidazolidin-2-ylidene) Phosphoramidate linkage
  modified_base order(2..14,15..25): mod_base = OTHER; note = Phosphorothioate linkage
  modified_base 14^15: mod_base = OTHER; note = Methylphosphonate linkage
  misc_feature 1..26: note = RM114788
ggcccttcgtctnatggacaaagtct

SEQ ID NO: 144 - DNA, 26 bp, synthetic construct
  source 1..26: mol_type = other DNA
  misc_feature 10..11: note = DNA
  misc_feature order(1..9,12..26): note = RNA
  modified_base 9: mod_base = OTHER; note = 2-Prime-O-Methoxyethyl modified 5-methyl Uridine
  modified_base 10: mod_base = OTHER; note = DNA nucleotide carrying a 6-amino-5-nitro-3-yl-2(1H)-pyridone nucleobase
  modified_base order(7,13): mod_base = OTHER; note = 2-Prime-Fluoro modified nucleoside
  modified_base order(1..6,8,12,14..26): mod_base = OTHER; note = 2-Prime-O-Methyl modified nucleoside
  modified_base order(1^2,25^26): mod_base = OTHER; note = (1,3-dimethylimidazolidin-2-ylidene) Phosphoramidate linkage
  modified_base order(2..11,12..25): mod_base = OTHER; note = Phosphorothioate linkage
  modified_base 11^12: mod_base = OTHER; note = Methylphosphonate linkage
  misc_feature 1..26: note = RM114789
ccttcgtctnatggacaaagtcttta

SEQ ID NO: 145 - DNA, 26 bp, synthetic construct
  source 1..26: mol_type = other DNA
  misc_feature 7..8: note = DNA
  misc_feature order(1..6,9..26): note = RNA
  modified_base 6: mod_base = OTHER; note = 2-Prime-O-Methoxyethyl modified 5-methyl Uridine
  modified_base 7: mod_base = OTHER; note = DNA nucleotide carrying a 6-amino-5-nitro-3-yl-2(1H)-pyridone nucleobase
  modified_base order(4,10): mod_base = OTHER; note = 2-Prime-Fluoro modified nucleoside
  modified_base order(1..3,5,9,11..26): mod_base = OTHER; note = 2-Prime-O-Methyl modified nucleoside
  modified_base order(1^2,25^26): mod_base = OTHER; note = (1,3-dimethylimidazolidin-2-ylidene) Phosphoramidate linkage
  modified_base order(2..8,9..25): mod_base = OTHER; note = Phosphorothioate linkage
  modified_base 8^9: mod_base = OTHER; note = Methylphosphonate linkage
  misc_feature 1..26: note = RM114790
tcgtctnatggacaaagtctttaaga

SEQ ID NO: 146 - DNA, 29 bp, synthetic construct
  source 1..29: mol_type = other DNA
  misc_feature 24..25: note = DNA
  misc_feature order(1..23,26..29): note = RNA
  modified_base 23: mod_base = OTHER; note = 2-Prime-O-Methoxyethyl modified 5-methyl Uridine
  modified_base 24: mod_base = OTHER; note = DNA nucleotide carrying a 6-amino-5-nitro-3-yl-2(1H)-pyridone nucleobase
  modified_base order(21,27): mod_base = OTHER; note = 2-Prime-Fluoro modified nucleoside
  modified_base order(1..20,22,26,28..29): mod_base = OTHER; note = 2-Prime-O-Methyl modified nucleoside
  modified_base order(1^2,28^29): mod_base = OTHER; note = (1,3-dimethylimidazolidin-2-ylidene) Phosphoramidate linkage
  modified_base order(2..25,26..28): mod_base = OTHER; note = Phosphorothioate linkage
  modified_base 25^26: mod_base = OTHER; note = Methylphosphonate linkage
  misc_feature 1..29: note = RM114791
gtcattaatttggcccttcgtctnatgga

SEQ ID NO: 147 - DNA, 29 bp, synthetic construct
  source 1..29: mol_type = other DNA
  misc_feature 21..22: note = DNA
  misc_feature order(1..20,23..29): note = RNA
  modified_base 20: mod_base = OTHER; note = 2-Prime-O-Methoxyethyl modified 5-methyl Uridine
  modified_base 21: mod_base = OTHER; note = DNA nucleotide carrying a 6-amino-5-nitro-3-yl-2(1H)-pyridone nucleobase
  modified_base order(18,24): mod_base = OTHER; note = 2-Prime-Fluoro modified nucleoside
  modified_base order(1..17,19,23,25..29): mod_base = OTHER; note = 2-Prime-O-Methyl modified nucleoside
  modified_base order(1^2,28^29): mod_base = OTHER; note = (1,3-dimethylimidazolidin-2-ylidene) Phosphoramidate linkage
  modified_base order(2..22,23..28): mod_base = OTHER; note = Phosphorothioate linkage
  modified_base 22^23: mod_base = OTHER; note = Methylphosphonate linkage
  misc_feature 1..29: note = RM114792
attaatttggcccttcgtctnatggacaa

SEQ ID NO: 148 - DNA, 29 bp, synthetic construct
  source 1..29: mol_type = other DNA
  misc_feature 18..19: note = DNA
  misc_feature order(1..17,20..29): note = RNA
  modified_base 17: mod_base = OTHER; note = 2-Prime-O-Methoxyethyl modified 5-methyl Uridine
  modified_base 18: mod_base = OTHER; note = DNA nucleotide carrying a 6-amino-5-nitro-3-yl-2(1H)-pyridone nucleobase
  modified_base order(15,21): mod_base = OTHER; note = 2-Prime-Fluoro modified nucleoside
  modified_base order(1..14,16,20,22..29): mod_base = OTHER; note = 2-Prime-O-Methyl modified nucleoside
  modified_base order(1^2,28^29): mod_base = OTHER; note = (1,3-dimethylimidazolidin-2-ylidene) Phosphoramidate linkage
  modified_base order(2..19,20..28): mod_base = OTHER; note = Phosphorothioate linkage
  modified_base 19^20: mod_base = OTHER; note = Methylphosphonate linkage
  misc_feature 1..29: note = RM114793
aatttggcccttcgtctnatggacaaagt

SEQ ID NO: 149 - DNA, 29 bp, synthetic construct
  source 1..29: mol_type = other DNA
  misc_feature 15..16: note = DNA
  misc_feature order(1..14,17..29): note = RNA
  modified_base 14: mod_base = OTHER; note = 2-Prime-O-Methoxyethyl modified 5-methyl Uridine
  modified_base 15: mod_base = OTHER; note = DNA nucleotide carrying a 6-amino-5-nitro-3-yl-2(1H)-pyridone nucleobase
  modified_base order(12,18): mod_base = OTHER; note = 2-Prime-Fluoro modified nucleoside
  modified_base order(1..11,13,17,19..29): mod_base = OTHER; note = 2-Prime-O-Methyl modified nucleoside
  modified_base order(1^2,28^29): mod_base = OTHER; note = (1,3-dimethylimidazolidin-2-ylidene) Phosphoramidate linkage
  modified_base order(2..16,17..28): mod_base = OTHER; note = Phosphorothioate linkage
  modified_base 16^17: mod_base = OTHER; note = Methylphosphonate linkage
  misc_feature 1..29: note = RM114794
ttggcccttcgtctnatggacaaagtctt

SEQ ID NO: 150 - DNA, 29 bp, synthetic construct
  source 1..29: mol_type = other DNA
  misc_feature 12..13: note = DNA
  misc_feature order(1..11,14..29): note = RNA
  modified_base 11: mod_base = OTHER; note = 2-Prime-O-Methoxyethyl modified 5-methyl Uridine
  modified_base 12: mod_base = OTHER; note = DNA nucleotide carrying a 6-amino-5-nitro-3-yl-2(1H)-pyridone nucleobase
  modified_base order(9,15): mod_base = OTHER; note = 2-Prime-Fluoro modified nucleoside
  modified_base order(1..8,10,14,16..29): mod_base = OTHER; note = 2-Prime-O-Methyl modified nucleoside
  modified_base order(1^2,28^29): mod_base = OTHER; note = (1,3-dimethylimidazolidin-2-ylidene) Phosphoramidate linkage
  modified_base order(2..13,14..28): mod_base = OTHER; note = Phosphorothioate linkage
  modified_base 13^14: mod_base = OTHER; note = Methylphosphonate linkage
  misc_feature 1..29: note = RM114795
gcccttcgtctnatggacaaagtctttaa

SEQ ID NO: 151 - DNA, 29 bp, synthetic construct
  source 1..29: mol_type = other DNA
  misc_feature 9..10: note = DNA
  misc_feature order(1..8,11..29): note = RNA
  modified_base 8: mod_base = OTHER; note = 2-Prime-O-Methoxyethyl modified 5-methyl Uridine
  modified_base 9: mod_base = OTHER; note = DNA nucleotide carrying a 6-amino-5-nitro-3-yl-2(1H)-pyridone nucleobase
  modified_base order(6,12): mod_base = OTHER; note = 2-Prime-Fluoro modified nucleoside
  modified_base order(1..5,7,11,13..29): mod_base = OTHER; note = 2-Prime-O-Methyl modified nucleoside
  modified_base order(1^2,28^29): mod_base = OTHER; note = (1,3-dimethylimidazolidin-2-ylidene) Phosphoramidate linkage
  modified_base order(2..10,11..28): mod_base = OTHER; note = Phosphorothioate linkage
  modified_base 10^11: mod_base = OTHER; note = Methylphosphonate linkage
  misc_feature 1..29: note = RM114796
cttcgtctnatggacaaagtctttaagac

SEQ ID NO: 152 - DNA, 29 bp, synthetic construct
  source 1..29: mol_type = other DNA
  misc_feature 6..7: note = DNA
  misc_feature order(1..5,8..29): note = RNA
  modified_base 5: mod_base = OTHER; note = 2-Prime-O-Methoxyethyl modified 5-methyl Uridine
  modified_base 6: mod_base = OTHER; note = DNA nucleotide carrying a 6-amino-5-nitro-3-yl-2(1H)-pyridone nucleobase
  modified_base order(3,9): mod_base = OTHER; note = 2-Prime-Fluoro modified nucleoside
  modified_base order(1..2,4,8,10..29): mod_base = OTHER; note = 2-Prime-O-Methyl modified nucleoside
  modified_base order(1^2,28^29): mod_base = OTHER; note = (1,3-dimethylimidazolidin-2-ylidene) Phosphoramidate linkage
  modified_base order(2..7,8..28): mod_base = OTHER; note = Phosphorothioate linkage
  modified_base 7^8: mod_base = OTHER; note = Methylphosphonate linkage
  misc_feature 1..29: note = RM114797
cgtctnatggacaaagtctttaagaccat

SEQ ID NO: 153 - DNA, 32 bp, synthetic construct; identical to SEQ ID NO: 79
  source 1..32: mol_type = other DNA
  misc_feature 10..11: note = DNA
  misc_feature order(1..9,12..32): note = RNA
  modified_base 9: mod_base = OTHER; note = 2-Prime-O-Methoxyethyl modified 5-methyl Uridine
  modified_base 10: mod_base = OTHER; note = DNA nucleotide carrying a 6-amino-5-nitro-3-yl-2(1H)-pyridone nucleobase
  modified_base order(8,13,19..20,26,30): mod_base = OTHER; note = 2-Prime-Fluoro modified nucleoside
  modified_base order(1..7,12,14..18,21..25,27..29,31..32): mod_base = OTHER; note = 2-Prime-O-Methyl modified nucleoside
  modified_base order(1^2,31^32): mod_base = OTHER; note = (1,3-dimethylimidazolidin-2-ylidene) Phosphoramidate linkage
  modified_base order(2..11,12..31): mod_base = OTHER; note = Phosphorothioate linkage
  modified_base 11^12: mod_base = OTHER; note = Methylphosphonate linkage
  misc_feature 1..32: note = RM114798

SEQ ID NO: 154 - DNA, 32 bp, synthetic construct; identical to SEQ ID NO: 80
  source 1..32: mol_type = other DNA
  misc_feature 7..8: note = DNA
  misc_feature order(1..6,9..32): note = RNA
  modified_base 6: mod_base = OTHER; note = 2-Prime-O-Methoxyethyl modified 5-methyl Uridine
  modified_base 7: mod_base = OTHER; note = DNA nucleotide carrying a 6-amino-5-nitro-3-yl-2(1H)-pyridone nucleobase
  modified_base order(5,10,16..17,23,27): mod_base = OTHER; note = 2-Prime-Fluoro modified nucleoside
  modified_base order(1..4,9,11..15,18..22,24..26,28..32): mod_base = OTHER; note = 2-Prime-O-Methyl modified nucleoside
  modified_base order(1^2,31^32): mod_base = OTHER; note = (1,3-dimethylimidazolidin-2-ylidene) Phosphoramidate linkage
  modified_base order(2..8,9..31): mod_base = OTHER; note = Phosphorothioate linkage
  modified_base 8^9: mod_base = OTHER; note = Methylphosphonate linkage
  misc_feature 1..32: note = RM114799

SEQ ID NO: 155 - DNA, 32 bp, synthetic construct; identical to SEQ ID NO: 73
  source 1..32: mol_type = other DNA
  misc_feature 28..29: note = DNA
  misc_feature order(1..27,30..32): note = RNA
  modified_base 27: mod_base = OTHER; note = 2-Prime-O-Methoxyethyl modified 5-methyl Uridine
  modified_base 28: mod_base = OTHER; note = DNA nucleotide carrying a 6-amino-5-nitro-3-yl-2(1H)-pyridone nucleobase
  modified_base order(10,14,20..21,31..32): mod_base = OTHER; note = 2-Prime-Fluoro modified nucleoside
  modified_base order(1..9,11..13,15..19,22..26,30): mod_base = OTHER; note = 2-Prime-O-Methyl modified nucleoside
  modified_base order(1^2,31^32): mod_base = OTHER; note = (1,3-dimethylimidazolidin-2-ylidene) Phosphoramidate linkage
  modified_base order(2..29,30^31): mod_base = OTHER; note = Phosphorothioate linkage
  modified_base 29^30: mod_base = OTHER; note = Methylphosphonate linkage
  misc_feature 1..32: note = RM114800

SEQ ID NO: 156 - DNA, 32 bp, synthetic construct; identical to SEQ ID NO: 74
  source 1..32: mol_type = other DNA
  misc_feature 25..26: note = DNA
  misc_feature order(1..24,27..32): note = RNA
  modified_base 24: mod_base = OTHER; note = 2-Prime-O-Methoxyethyl modified 5-methyl Uridine
  modified_base 25: mod_base = OTHER; note = DNA nucleotide carrying a 6-amino-5-nitro-3-yl-2(1H)-pyridone nucleobase
  modified_base order(7,11,17..18,28..29): mod_base = OTHER; note = 2-Prime-Fluoro modified nucleoside
  modified_base order(1..6,8..10,12..16,19..23,27,30..32): mod_base = OTHER; note = 2-Prime-O-Methyl modified nucleoside
  modified_base order(1^2,31^32): mod_base = OTHER; note = (1,3-dimethylimidazolidin-2-ylidene) Phosphoramidate linkage
  modified_base order(2..26,27..31): mod_base = OTHER; note = Phosphorothioate linkage
  modified_base 26^27: mod_base = OTHER; note = Methylphosphonate linkage
  misc_feature 1..32: note = RM114801

SEQ ID NO: 157 - DNA, 32 bp, synthetic construct; identical to SEQ ID NO: 75
  source 1..32: mol_type = other DNA
  misc_feature 22..23: note = DNA
  misc_feature order(1..21,24..32): note = RNA
  modified_base 21: mod_base = OTHER; note = 2-Prime-O-Methoxyethyl modified 5-methyl Uridine
  modified_base 22: mod_base = OTHER; note = DNA nucleotide carrying a 6-amino-5-nitro-3-yl-2(1H)-pyridone nucleobase
  modified_base order(4,8,14..15,25..26): mod_base = OTHER; note = 2-Prime-Fluoro modified nucleoside
  modified_base order(1..3,5..7,9..13,16..20,24,27..32): mod_base = OTHER; note = 2-Prime-O-Methyl modified nucleoside
  modified_base order(1^2,31^32): mod_base = OTHER; note = (1,3-dimethylimidazolidin-2-ylidene) Phosphoramidate linkage
  modified_base order(2..23,24..31): mod_base = OTHER; note = Phosphorothioate linkage
  modified_base 23^24: mod_base = OTHER; note = Methylphosphonate linkage
  misc_feature 1..32: note = RM114802

SEQ ID NO: 158 - DNA, 32 bp, synthetic construct; identical to SEQ ID NO: 76
  source 1..32: mol_type = other DNA
  misc_feature 19..20: note = DNA
  misc_feature order(1..18,21..32): note = RNA
  modified_base 18: mod_base = OTHER; note = 2-Prime-O-Methoxyethyl modified 5-methyl Uridine
  modified_base 19: mod_base = OTHER; note = DNA nucleotide carrying a 6-amino-5-nitro-3-yl-2(1H)-pyridone nucleobase
  modified_base order(1,5,11..12,22..23): mod_base = OTHER; note = 2-Prime-Fluoro modified nucleoside
  modified_base order(2..4,6..10,13..17,21,24..32): mod_base = OTHER; note = 2-Prime-O-Methyl modified nucleoside
  modified_base order(1^2,31^32): mod_base = OTHER; note = (1,3-dimethylimidazolidin-2-ylidene) Phosphoramidate linkage
  modified_base order(2..20,21..31): mod_base = OTHER; note = Phosphorothioate linkage
  modified_base 20^21: mod_base = OTHER; note = Methylphosphonate linkage
  misc_feature 1..32: note = RM114803

SEQ ID NO: 159 - DNA, 23 bp, synthetic construct
  source 1..23: mol_type = other DNA
  misc_feature 12..13: note = DNA
  misc_feature order(1..11,14..23): note = RNA
  modified_base 11: mod_base = OTHER; note = 2-Prime-O-Methoxyethyl modified 5-methyl Uridine
  modified_base 12: mod_base = OTHER; note = DNA nucleotide carrying a 6-amino-5-nitro-3-yl-2(1H)-pyridone nucleobase
  modified_base order(10,15,21..22): mod_base = OTHER; note = 2-Prime-Fluoro modified nucleoside
  modified_base order(1..9,14,16..20,23): mod_base = OTHER; note = 2-Prime-O-Methyl modified nucleoside
  modified_base order(1^2,22^23): mod_base = OTHER; note = (1,3-dimethylimidazolidin-2-ylidene) Phosphoramidate linkage
  modified_base order(2..13,14..22): mod_base = OTHER; note = Phosphorothioate linkage
  modified_base 13^14: mod_base = OTHER; note = Methylphosphonate linkage
  misc_feature 1..23: note = RM114804
gcccttcgtctnatggacaaagt

SEQ ID NO: 160 - DNA, 23 bp, synthetic construct
  source 1..23: mol_type = other DNA
  misc_feature 9..10: note = DNA
  misc_feature order(1..8,11..23): note = RNA
  modified_base 8: mod_base = OTHER; note = 2-Prime-O-Methoxyethyl modified 5-methyl Uridine
  modified_base 9: mod_base = OTHER; note = DNA nucleotide carrying a 6-amino-5-nitro-3-yl-2(1H)-pyridone nucleobase
  modified_base order(7,12,18..19): mod_base = OTHER; note = 2-Prime-Fluoro modified nucleoside
  modified_base order(1..6,11,13..17,20..23): mod_base = OTHER; note = 2-Prime-O-Methyl modified nucleoside
  modified_base order(1^2,22^23): mod_base = OTHER; note = (1,3-dimethylimidazolidin-2-ylidene) Phosphoramidate linkage
  modified_base order(2..10,11..22): mod_base = OTHER; note = Phosphorothioate linkage
  modified_base 10^11: mod_base = OTHER; note = Methylphosphonate linkage
  misc_feature 1..23: note = RM114805
cttcgtctnatggacaaagtctt

SEQ ID NO: 161 - DNA, 23 bp, synthetic construct
  source 1..23: mol_type = other DNA
  misc_feature 6..7: note = DNA
  misc_feature order(1..5,8..23): note = RNA
  modified_base 5: mod_base = OTHER; note = 2-Prime-O-Methoxyethyl modified 5-methyl Uridine
  modified_base 6: mod_base = OTHER; note = DNA nucleotide carrying a 6-amino-5-nitro-3-yl-2(1H)-pyridone nucleobase
  modified_base order(4,9,15..16): mod_base = OTHER; note = 2-Prime-Fluoro modified nucleoside
  modified_base order(1..3,8,10..14,17..23): mod_base = OTHER; note = 2-Prime-O-Methyl modified nucleoside
  modified_base order(1^2,22^23): mod_base = OTHER; note = (1,3-dimethylimidazolidin-2-ylidene) Phosphoramidate linkage
  modified_base order(2..7,8..22): mod_base = OTHER; note = Phosphorothioate linkage
  modified_base 7^8: mod_base = OTHER; note = Methylphosphonate linkage
  misc_feature 1..23: note = RM114806
cgtctnatggacaaagtctttaa

SEQ ID NO: 162 - DNA, 23 bp, synthetic construct
  source 1..23: mol_type = other DNA
  misc_feature 18..19: note = DNA
  misc_feature order(1..17,20..23): note = RNA
  modified_base 17: mod_base = OTHER; note = 2-Prime-O-Methoxyethyl modified 5-methyl Uridine
  modified_base 18: mod_base = OTHER; note = DNA nucleotide carrying a 6-amino-5-nitro-3-yl-2(1H)-pyridone nucleobase
  modified_base order(10..11,21..22): mod_base = OTHER; note = 2-Prime-Fluoro modified nucleoside
  modified_base order(1..9,12..16,20,23): mod_base = OTHER; note = 2-Prime-O-Methyl modified nucleoside
  modified_base order(1^2,22^23): mod_base = OTHER; note = (1,3-dimethylimidazolidin-2-ylidene) Phosphoramidate linkage
  modified_base order(2..19,20..22): mod_base = OTHER; note = Phosphorothioate linkage
  modified_base 19^20: mod_base = OTHER; note = Methylphosphonate linkage
  misc_feature 1..23: note = RM114807
aatttggcccttcgtctnatgga

SEQ ID NO: 163 - DNA, 23 bp, synthetic construct
  source 1..23: mol_type = other DNA
  misc_feature 15..16: note = DNA
  misc_feature order(1..14,17..23): note = RNA
  modified_base 14: mod_base = OTHER; note = 2-Prime-O-Methoxyethyl modified 5-methyl Uridine
  modified_base 15: mod_base = OTHER; note = DNA nucleotide carrying a 6-amino-5-nitro-3-yl-2(1H)-pyridone nucleobase
  modified_base order(7..8,18..19): mod_base = OTHER; note = 2-Prime-Fluoro modified nucleoside
  modified_base order(1..6,9..13,17,20..23): mod_base = OTHER; note = 2-Prime-O-Methyl modified nucleoside
  modified_base order(1^2,22^23): mod_base = OTHER; note = (1,3-dimethylimidazolidin-2-ylidene) Phosphoramidate linkage
  modified_base order(2..16,17..22): mod_base = OTHER; note = Phosphorothioate linkage
  modified_base 16^17: mod_base = OTHER; note = Methylphosphonate linkage
  misc_feature 1..23: note = RM114808
ttggcccttcgtctnatggacaa

SEQ ID NO: 164 - DNA, 23 bp, synthetic construct
  source 1..23: mol_type = other DNA
  misc_feature 12..13: note = DNA
  misc_feature order(1..11,14..23): note = RNA
  modified_base 11: mod_base = OTHER; note = 2-Prime-O-Methoxyethyl modified 5-methyl Uridine
  modified_base 12: mod_base = OTHER; note = DNA nucleotide carrying a 6-amino-5-nitro-3-yl-2(1H)-pyridone nucleobase
  modified_base order(4..5,15..16): mod_base = OTHER; note = 2-Prime-Fluoro modified nucleoside
  modified_base order(1..3,6..10,14,17..23): mod_base = OTHER; note = 2-Prime-O-Methyl modified nucleoside
  modified_base order(1^2,22^23): mod_base = OTHER; note = (1,3-dimethylimidazolidin-2-ylidene) Phosphoramidate linkage
  modified_base order(2..13,14..22): mod_base = OTHER; note = Phosphorothioate linkage
  modified_base 13^14: mod_base = OTHER; note = Methylphosphonate linkage
  misc_feature 1..23: note = RM114809
gcccttcgtctnatggacaaagt

SEQ ID NO: 165 - DNA, 23 bp, synthetic construct
  source 1..23: mol_type = other DNA
  misc_feature 9..10: note = DNA
  misc_feature order(1..8,11..23): note = RNA
  modified_base 8: mod_base = OTHER; note = 2-Prime-O-Methoxyethyl modified 5-methyl Uridine
  modified_base 9: mod_base = OTHER; note = DNA nucleotide carrying a 6-amino-5-nitro-3-yl-2(1H)-pyridone nucleobase
  modified_base order(1..2,12..13): mod_base = OTHER; note = 2-Prime-Fluoro modified nucleoside
  modified_base order(3..7,11,14..23): mod_base = OTHER; note = 2-Prime-O-Methyl modified nucleoside
  modified_base order(1^2,22^23): mod_base = OTHER; note = (1,3-dimethylimidazolidin-2-ylidene) Phosphoramidate linkage
  modified_base order(2..10,11..22): mod_base = OTHER; note = Phosphorothioate linkage
  modified_base 10^11: mod_base = OTHER; note = Methylphosphonate linkage
  misc_feature 1..23: note = RM114810
cttcgtctnatggacaaagtctt

SEQ ID NO: 166 - DNA, 23 bp, synthetic construct
  source 1..23: mol_type = other DNA
  misc_feature 18..19: note = DNA
  misc_feature order(1..17,20..23): note = RNA
  modified_base 17: mod_base = OTHER; note = 2-Prime-O-Methoxyethyl modified 5-methyl Uridine
  modified_base 18: mod_base = OTHER; note = DNA nucleotide carrying a 6-amino-5-nitro-3-yl-2(1H)-pyridone nucleobase
  modified_base order(16,21): mod_base = OTHER; note = 2-Prime-Fluoro modified nucleoside
  modified_base order(1..15,20,22..23): mod_base = OTHER; note = 2-Prime-O-Methyl modified nucleoside
  modified_base order(1^2,22^23): mod_base = OTHER; note = (1,3-dimethylimidazolidin-2-ylidene) Phosphoramidate linkage
  modified_base order(2..19,20..22): mod_base = OTHER; note = Phosphorothioate linkage
  modified_base 19^20: mod_base = OTHER; note = Methylphosphonate linkage
  misc_feature 1..23: note = RM114811
aatttggcccttcgtctnatgga

SEQ ID NO: 167 - DNA, 23 bp, synthetic construct
  source 1..23: mol_type = other DNA
  misc_feature 15..16: note = DNA
  misc_feature order(1..14,17..23): note = RNA
  modified_base 14: mod_base = OTHER; note = 2-Prime-O-Methoxyethyl modified 5-methyl Uridine
  modified_base 15: mod_base = OTHER; note = DNA nucleotide carrying a 6-amino-5-nitro-3-yl-2(1H)-pyridone nucleobase
  modified_base order(13,18): mod_base = OTHER; note = 2-Prime-Fluoro modified nucleoside
  modified_base order(1..12,17,19..23): mod_base = OTHER; note = 2-Prime-O-Methyl modified nucleoside
  modified_base order(1^2,22^23): mod_base = OTHER; note = (1,3-dimethylimidazolidin-2-ylidene) Phosphoramidate linkage
  modified_base order(2..16,17..22): mod_base = OTHER; note = Phosphorothioate linkage
  modified_base 16^17: mod_base = OTHER; note = Methylphosphonate linkage
  misc_feature 1..23: note = RM114812
ttggcccttcgtctnatggacaa

SEQ ID NO: 168 - DNA, 23 bp, synthetic construct
  source 1..23: mol_type = other DNA
  misc_feature 12..13: note = DNA
  misc_feature order(1..11,14..23): note = RNA
  modified_base 11: mod_base = OTHER; note = 2-Prime-O-Methoxyethyl modified 5-methyl Uridine
  modified_base 12: mod_base = OTHER; note = DNA nucleotide carrying a 6-amino-5-nitro-3-yl-2(1H)-pyridone nucleobase
  modified_base order(10,15): mod_base = OTHER; note = 2-Prime-Fluoro modified nucleoside
  modified_base order(1..9,14,16..23): mod_base = OTHER; note = 2-Prime-O-Methyl modified nucleoside
  modified_base order(1^2,22^23): mod_base = OTHER; note = (1,3-dimethylimidazolidin-2-ylidene) Phosphoramidate linkage
  modified_base order(2..13,14..22): mod_base = OTHER; note = Phosphorothioate linkage
  modified_base 13^14: mod_base = OTHER; note = Methylphosphonate linkage
  misc_feature 1..23: note = RM114813
gcccttcgtctnatggacaaagt

SEQ ID NO: 169 - DNA, 23 bp, synthetic construct
  source 1..23: mol_type = other DNA
  misc_feature 9..10: note = DNA
  misc_feature order(1..8,11..23): note = RNA
  modified_base 8: mod_base = OTHER; note = 2-Prime-O-Methoxyethyl modified 5-methyl Uridine
  modified_base 9: mod_base = OTHER; note = DNA nucleotide carrying a 6-amino-5-nitro-3-yl-2(1H)-pyridone nucleobase
  modified_base order(7,12): mod_base = OTHER; note = 2-Prime-Fluoro modified nucleoside
  modified_base order(1..6,11,13..23): mod_base = OTHER; note = 2-Prime-O-Methyl modified nucleoside
  modified_base order(1^2,22^23): mod_base = OTHER; note = (1,3-dimethylimidazolidin-2-ylidene) Phosphoramidate linkage
  modified_base order(2..10,11..22): mod_base = OTHER; note = Phosphorothioate linkage
  modified_base 10^11: mod_base = OTHER; note = Methylphosphonate linkage
  misc_feature 1..23: note = RM114814
cttcgtctnatggacaaagtctt

SEQ ID NO: 170 - DNA, 23 bp, synthetic construct
  source 1..23: mol_type = other DNA
  misc_feature 6..7: note = DNA
  misc_feature order(1..5,8..23): note = RNA
  modified_base 5: mod_base = OTHER; note = 2-Prime-O-Methoxyethyl modified 5-methyl Uridine
  modified_base 6: mod_base = OTHER; note = DNA nucleotide carrying a 6-amino-5-nitro-3-yl-2(1H)-pyridone nucleobase
  modified_base order(4,9): mod_base = OTHER; note = 2-Prime-Fluoro modified nucleoside
  modified_base order(1..3,8,10..23): mod_base = OTHER; note = 2-Prime-O-Methyl modified nucleoside
  modified_base order(1^2,22^23): mod_base = OTHER; note = (1,3-dimethylimidazolidin-2-ylidene) Phosphoramidate linkage
  modified_base order(2..7,8..22): mod_base = OTHER; note = Phosphorothioate linkage
  modified_base 7^8: mod_base = OTHER; note = Methylphosphonate linkage
  misc_feature 1..23: note = RM114815
cgtctnatggacaaagtctttaa

SEQ ID NO: 171 - DNA, 26 bp, synthetic construct
  source 1..26: mol_type = other DNA
  misc_feature 22..23: note = DNA
  misc_feature order(1..21,24..26): note = RNA
  modified_base 21: mod_base = OTHER; note = 2-Prime-O-Methoxyethyl modified 5-methyl Uridine
  modified_base 22: mod_base = OTHER; note = DNA nucleotide carrying a 6-amino-5-nitro-3-yl-2(1H)-pyridone nucleobase
  modified_base order(20,25): mod_base = OTHER; note = 2-Prime-Fluoro modified nucleoside
  modified_base order(1..19,24,26): mod_base = OTHER; note = 2-Prime-O-Methyl modified nucleoside
  modified_base order(1^2,25^26): mod_base = OTHER; note = (1,3-dimethylimidazolidin-2-ylidene) Phosphoramidate linkage
  modified_base order(2..23,24^25): mod_base = OTHER; note = Phosphorothioate linkage
  modified_base 23^24: mod_base = OTHER; note = Methylphosphonate linkage
  misc_feature 1..26: note = RM114816
cattaatttggcccttcgtctnatgg

SEQ ID NO: 172 - DNA, 26 bp, synthetic construct
  source 1..26: mol_type = other DNA
  misc_feature 19..20: note = DNA
  misc_feature order(1..18,21..26): note = RNA
  modified_base 18: mod_base = OTHER; note = 2-Prime-O-Methoxyethyl modified 5-methyl Uridine
  modified_base 19: mod_base = OTHER; note = DNA nucleotide carrying a 6-amino-5-nitro-3-yl-2(1H)-pyridone nucleobase
  modified_base order(17,22): mod_base = OTHER; note = 2-Prime-Fluoro modified nucleoside
  modified_base order(1..16,21,23..26): mod_base = OTHER; note = 2-Prime-O-Methyl modified nucleoside
  modified_base order(1^2,25^26): mod_base = OTHER; note = (1,3-dimethylimidazolidin-2-ylidene) Phosphoramidate linkage
  modified_base order(2..20,21..25): mod_base = OTHER; note = Phosphorothioate linkage
  modified_base 20^21: mod_base = OTHER; note = Methylphosphonate linkage
  misc_feature 1..26: note = RM114817
taatttggcccttcgtctnatggaca

SEQ ID NO: 173 - DNA, 26 bp, synthetic construct
  source 1..26: mol_type = other DNA
  misc_feature 16..17: note = DNA
  misc_feature order(1..15,18..26): note = RNA
  modified_base 15: mod_base = OTHER; note = 2-Prime-O-Methoxyethyl modified 5-methyl Uridine
  modified_base 16: mod_base = OTHER; note = DNA nucleotide carrying a 6-amino-5-nitro-3-yl-2(1H)-pyridone nucleobase
  modified_base order(14,19): mod_base = OTHER; note = 2-Prime-Fluoro modified nucleoside
  modified_base order(1..13,18,20..26): mod_base = OTHER; note = 2-Prime-O-Methyl modified nucleoside
  modified_base order(1^2,25^26): mod_base = OTHER; note = (1,3-dimethylimidazolidin-2-ylidene) Phosphoramidate linkage
  modified_base order(2..17,18..25): mod_base = OTHER; note = Phosphorothioate linkage
  modified_base 17^18: mod_base = OTHER; note = Methylphosphonate linkage
  misc_feature 1..26: note = RM114818
tttggcccttcgtctnatggacaaag

SEQ ID NO: 174 - DNA, 26 bp, synthetic construct
  source 1..26: mol_type = other DNA
  misc_feature 13..14: note = DNA
  misc_feature order(1..12,15..26): note = RNA
  modified_base 12: mod_base = OTHER; note = 2-Prime-O-Methoxyethyl modified 5-methyl Uridine
  modified_base 13: mod_base = OTHER; note = DNA nucleotide carrying a 6-amino-5-nitro-3-yl-2(1H)-pyridone nucleobase
  modified_base order(11,16): mod_base = OTHER; note = 2-Prime-Fluoro modified nucleoside
  modified_base order(1..10,15,17..26): mod_base = OTHER; note = 2-Prime-O-Methyl modified nucleoside
  modified_base order(1^2,25^26): mod_base = OTHER; note = (1,3-dimethylimidazolidin-2-ylidene) Phosphoramidate linkage
  modified_base order(2..14,15..25): mod_base = OTHER; note = Phosphorothioate linkage
  modified_base 14^15: mod_base = OTHER; note = Methylphosphonate linkage
  misc_feature 1..26: note = RM114819
ggcccttcgtctnatggacaaagtct

SEQ ID NO: 175 - DNA, 26 bp, synthetic construct
  source 1..26: mol_type = other DNA
  misc_feature 10..11: note = DNA
  misc_feature order(1..9,12..26): note = RNA
  modified_base 9: mod_base = OTHER; note = 2-Prime-O-Methoxyethyl modified 5-methyl Uridine
  modified_base 10: mod_base = OTHER; note = DNA nucleotide carrying a 6-amino-5-nitro-3-yl-2(1H)-pyridone nucleobase
  modified_base order(8,13): mod_base = OTHER; note = 2-Prime-Fluoro modified nucleoside
  modified_base order(1..7,12,14..26): mod_base = OTHER; note = 2-Prime-O-Methyl modified nucleoside
  modified_base order(1^2,25^26): mod_base = OTHER; note = (1,3-dimethylimidazolidin-2-ylidene) Phosphoramidate linkage
  modified_base order(2..11,12..25): mod_base = OTHER; note = Phosphorothioate linkage
  modified_base 11^12: mod_base = OTHER; note = Methylphosphonate linkage
  misc_feature 1..26: note = RM114820
ccttcgtctnatggacaaagtcttta

SEQ ID NO: 176 - DNA, 26 bp, synthetic construct
  source 1..26: mol_type = other DNA
  misc_feature 7..8: note = DNA
  misc_feature order(1..6,9..26): note = RNA
  modified_base 6: mod_base = OTHER; note = 2-Prime-O-Methoxyethyl modified 5-methyl Uridine
  modified_base 7: mod_base = OTHER; note = DNA nucleotide carrying a 6-amino-5-nitro-3-yl-2(1H)-pyridone nucleobase
  modified_base order(5,10): mod_base = OTHER; note = 2-Prime-Fluoro modified nucleoside
  modified_base order(1..4,9,11..26): mod_base = OTHER; note = 2-Prime-O-Methyl modified nucleoside
  modified_base order(1^2,25^26): mod_base = OTHER; note = (1,3-dimethylimidazolidin-2-ylidene) Phosphoramidate linkage
  modified_base order(2..8,9..25): mod_base = OTHER; note = Phosphorothioate linkage
  modified_base 8^9: mod_base = OTHER; note = Methylphosphonate linkage
  misc_feature 1..26: note = RM114821
tcgtctnatggacaaagtctttaaga

SEQ ID NO: 177 - DNA, 29 bp, synthetic construct
  source 1..29: mol_type = other DNA
  misc_feature 24..25: note = DNA
  misc_feature order(1..23,26..29): note = RNA
  modified_base 23: mod_base = OTHER; note = 2-Prime-O-Methoxyethyl modified 5-methyl Uridine
  modified_base 24: mod_base = OTHER; note = DNA nucleotide carrying a 6-amino-5-nitro-3-yl-2(1H)-pyridone nucleobase
  modified_base order(22,27): mod_base = OTHER; note = 2-Prime-Fluoro modified nucleoside
  modified_base order(1..21,26,28..29): mod_base = OTHER; note = 2-Prime-O-Methyl modified nucleoside
  modified_base order(1^2,28^29): mod_base = OTHER; note = (1,3-dimethylimidazolidin-2-ylidene) Phosphoramidate linkage
  modified_base order(2..25,26..28): mod_base = OTHER; note = Phosphorothioate linkage
  modified_base 25^26: mod_base = OTHER; note = Methylphosphonate linkage
  misc_feature 1..29: note = RM114822
gtcattaatttggcccttcgtctnatgga

SEQ ID NO: 178 - DNA, 29 bp, synthetic construct
  source 1..29: mol_type = other DNA
  misc_feature 21..22: note = DNA
  misc_feature order(1..20,23..29): note = RNA
  modified_base 20: mod_base = OTHER; note = 2-Prime-O-Methoxyethyl modified 5-methyl Uridine
  modified_base 21: mod_base = OTHER; note = DNA nucleotide carrying a 6-amino-5-nitro-3-yl-2(1H)-pyridone nucleobase
  modified_base order(19,24): mod_base = OTHER; note = 2-Prime-Fluoro modified nucleoside
  modified_base order(1..18,23,25..29): mod_base = OTHER; note = 2-Prime-O-Methyl modified nucleoside
  modified_base order(1^2,28^29): mod_base = OTHER; note = (1,3-dimethylimidazolidin-2-ylidene) Phosphoramidate linkage
  modified_base order(2..22,23..28): mod_base = OTHER; note = Phosphorothioate linkage
  modified_base 22^23: mod_base = OTHER; note = Methylphosphonate linkage
  misc_feature 1..29: note = RM114823
attaatttggcccttcgtctnatggacaa

SEQ ID NO: 179 - DNA, 29 bp, synthetic construct
  source 1..29: mol_type = other DNA
  misc_feature 18..19: note = DNA
  misc_feature order(1..17,20..29): note = RNA
  modified_base 17: mod_base = OTHER; note = 2-Prime-O-Methoxyethyl modified 5-methyl Uridine
  modified_base 18: mod_base = OTHER; note = DNA nucleotide carrying a 6-amino-5-nitro-3-yl-2(1H)-pyridone nucleobase
  modified_base order(16,21): mod_base = OTHER; note = 2-Prime-Fluoro modified nucleoside
  modified_base order(1..15,20,22..29): mod_base = OTHER; note = 2-Prime-O-Methyl modified nucleoside
  modified_base order(1^2,28^29): mod_base = OTHER; note = (1,3-dimethylimidazolidin-2-ylidene) Phosphoramidate linkage
  modified_base order(2..19,20..28): mod_base = OTHER; note = Phosphorothioate linkage
  modified_base 19^20: mod_base = OTHER; note = Methylphosphonate linkage
  misc_feature 1..29: note = RM114824
aatttggcccttcgtctnatggacaaagt

SEQ ID NO: 180 - DNA, 29 bp, synthetic construct
  source 1..29: mol_type = other DNA
  misc_feature 15..16: note = DNA
  misc_feature order(1..14,17..29): note = RNA
  modified_base 14: mod_base = OTHER; note = 2-Prime-O-Methoxyethyl modified 5-methyl Uridine
  modified_base 15: mod_base = OTHER; note = DNA nucleotide carrying a 6-amino-5-nitro-3-yl-2(1H)-pyridone nucleobase
  modified_base order(13,18): mod_base = OTHER; note = 2-Prime-Fluoro modified nucleoside
  modified_base order(1..12,17,19..29): mod_base = OTHER; note = 2-Prime-O-Methyl modified nucleoside
  modified_base order(1^2,28^29): mod_base = OTHER; note = (1,3-dimethylimidazolidin-2-ylidene) Phosphoramidate linkage
  modified_base order(2..16,17..28): mod_base = OTHER; note = Phosphorothioate linkage
  modified_base 16^17: mod_base = OTHER; note = Methylphosphonate linkage
  misc_feature 1..29: note = RM114825
ttggcccttcgtctnatggacaaagtctt

SEQ ID NO: 181 - DNA, 29 bp, synthetic construct
  source 1..29: mol_type = other DNA
  misc_feature 12..13: note = DNA
  misc_feature order(1..11,14..29): note = RNA
  modified_base 11: mod_base = OTHER; note = 2-Prime-O-Methoxyethyl modified 5-methyl Uridine
  modified_base 12: mod_base = OTHER; note = DNA nucleotide carrying a 6-amino-5-nitro-3-yl-2(1H)-pyridone nucleobase
  modified_base order(10,15): mod_base = OTHER; note = 2-Prime-Fluoro modified nucleoside
  modified_base order(1..9,14,16..29): mod_base = OTHER; note = 2-Prime-O-Methyl modified nucleoside
  modified_base order(1^2,28^29): mod_base = OTHER; note = (1,3-dimethylimidazolidin-2-ylidene) Phosphoramidate linkage
  modified_base order(2..13,14..28): mod_base = OTHER; note = Phosphorothioate linkage
  modified_base 13^14: mod_base = OTHER; note = Methylphosphonate linkage
  misc_feature 1..29: note = RM114826
gcccttcgtctnatggacaaagtctttaa

SEQ ID NO: 182 - DNA, 29 bp, synthetic construct
  source 1..29: mol_type = other DNA
  misc_feature 9..10: note = DNA
  misc_feature order(1..8,11..29): note = RNA
  modified_base 8: mod_base = OTHER; note = 2-Prime-O-Methoxyethyl modified 5-methyl Uridine
  modified_base 9: mod_base = OTHER; note = DNA nucleotide carrying a 6-amino-5-nitro-3-yl-2(1H)-pyridone nucleobase
  modified_base order(7,12): mod_base = OTHER; note = 2-Prime-Fluoro modified nucleoside
  modified_base order(1..6,11,13..29): mod_base = OTHER; note = 2-Prime-O-Methyl modified nucleoside
  modified_base order(1^2,28^29): mod_base = OTHER; note = (1,3-dimethylimidazolidin-2-ylidene) Phosphoramidate linkage
  modified_base order(2..10,11..28): mod_base = OTHER; note = Phosphorothioate linkage
  modified_base 10^11: mod_base = OTHER; note = Methylphosphonate linkage
  misc_feature 1..29: note = RM114827
cttcgtctnatggacaaagtctttaagac

SEQ ID NO: 183 - DNA, 29 bp, synthetic construct
  source 1..29: mol_type = other DNA
  misc_feature 6..7: note = DNA
  misc_feature order(1..5,8..29): note = RNA
  modified_base 5: mod_base = OTHER; note = 2-Prime-O-Methoxyethyl modified 5-methyl Uridine
  modified_base 6: mod_base = OTHER; note = DNA nucleotide carrying a 6-amino-5-nitro-3-yl-2(1H)-pyridone nucleobase
  modified_base order(4,9): mod_base = OTHER; note = 2-Prime-Fluoro modified nucleoside
  modified_base order(1..3,8,10..29): mod_base = OTHER; note = 2-Prime-O-Methyl modified nucleoside
  modified_base order(1^2,28^29): mod_base = OTHER; note = (1,3-dimethylimidazolidin-2-ylidene) Phosphoramidate linkage
  modified_base order(2..7,8..28): mod_base = OTHER; note = Phosphorothioate linkage
  modified_base 7^8: mod_base = OTHER; note = Methylphosphonate linkage
  misc_feature 1..29: note = RM114828
cgtctnatggacaaagtctttaagaccat

SEQ ID NO: 184 - DNA, 32 bp, synthetic construct; identical to SEQ ID NO: 74
  source 1..32: mol_type = other DNA
  misc_feature 25..26: note = DNA
  misc_feature order(1..24,27..32): note = RNA
  modified_base 24: mod_base = OTHER; note = 2-Prime-O-Methoxyethyl modified 5-methyl Uridine
  modified_base 25: mod_base = OTHER; note = DNA nucleotide carrying a 6-amino-5-nitro-3-yl-2(1H)-pyridone nucleobase
  modified_base order(3,5,11,14..15,19..20,28,30): mod_base = OTHER; note = 2-Prime-Fluoro modified nucleoside
  modified_base order(1..2,4,6..10,12..13,16..18,21..23,27,29,31..32): mod_base = OTHER; note = 2-Prime-O-Methyl modified nucleoside
  modified_base order(1^2,31^32): mod_base = OTHER; note = (1,3-dimethylimidazolidin-2-ylidene) Phosphoramidate linkage
  modified_base order(2..26,27..31): mod_base = OTHER; note = Phosphorothioate linkage
  modified_base 26^27: mod_base = OTHER; note = Methylphosphonate linkage
  misc_feature 1..32: note = RM114829

SEQ ID NO: 185 - DNA, 32 bp, synthetic construct; identical to SEQ ID NO: 80
  source 1..32: mol_type = other DNA
  misc_feature 7..8: note = DNA
  misc_feature order(1..6,9..32): note = RNA
  modified_base 6: mod_base = OTHER; note = 2-Prime-O-Methoxyethyl modified 5-methyl Uridine
  modified_base 7: mod_base = OTHER; note = DNA nucleotide carrying a 6-amino-5-nitro-3-yl-2(1H)-pyridone nucleobase
  modified_base order(4,10,14..15,19..20,23,29,31): mod_base = OTHER; note = 2-Prime-Fluoro modified nucleoside
  modified_base order(1..3,5,9,11..13,16..18,21..22,24..28,30,32): mod_base = OTHER; note = 2-Prime-O-Methyl modified nucleoside
  modified_base order(1^2,31^32): mod_base = OTHER; note = (1,3-dimethylimidazolidin-2-ylidene) Phosphoramidate linkage
  modified_base order(2..8,9..31): mod_base = OTHER; note = Phosphorothioate linkage
  modified_base 8^9: mod_base = OTHER; note = Methylphosphonate linkage
  misc_feature 1..32: note = RM114830

SEQ ID NO: 186 - DNA, 23 bp, synthetic construct
  source 1..23: mol_type = other DNA
  misc_feature 18..19: note = DNA
  misc_feature order(1..17,20..23): note = RNA
  modified_base 17: mod_base = OTHER; note = 2-Prime-O-Methoxyethyl modified 5-methyl Uridine
  modified_base 18: mod_base = OTHER; note = DNA nucleotide carrying a 6-amino-5-nitro-3-yl-2(1H)-pyridone nucleobase
  modified_base order(7..8,12..13,21,23): mod_base = OTHER; note = 2-Prime-Fluoro modified nucleoside
  modified_base order(1..6,9..11,14..16,20,22): mod_base = OTHER; note = 2-Prime-O-Methyl modified nucleoside
  modified_base order(1^2,22^23): mod_base = OTHER; note = (1,3-dimethylimidazolidin-2-ylidene) Phosphoramidate linkage
  modified_base order(2..19,20..22): mod_base = OTHER; note = Phosphorothioate linkage
  modified_base 19^20: mod_base = OTHER; note = Methylphosphonate linkage
  misc_feature 1..23: note = RM114831
aatttggcccttcgtctnatgga

SEQ ID NO: 187 - DNA, 23 bp, synthetic construct
  source 1..23: mol_type = other DNA
  misc_feature 15..16: note = DNA
  misc_feature order(1..14,17..23): note = RNA
  modified_base 14: mod_base = OTHER; note = 2-Prime-O-Methoxyethyl modified 5-methyl Uridine
  modified_base 15: mod_base = OTHER; note = DNA nucleotide carrying a 6-amino-5-nitro-3-yl-2(1H)-pyridone nucleobase
  modified_base order(4..5,9..10,18,20): mod_base = OTHER; note = 2-Prime-Fluoro modified nucleoside
  modified_base order(1..3,6..8,11..13,17,19,21..23): mod_base = OTHER; note = 2-Prime-O-Methyl modified nucleoside
  modified_base order(1^2,22^23): mod_base = OTHER; note = (1,3-dimethylimidazolidin-2-ylidene) Phosphoramidate linkage
  modified_base order(2..16,17..22): mod_base = OTHER; note = Phosphorothioate linkage
  modified_base 16^17: mod_base = OTHER; note = Methylphosphonate linkage
  misc_feature 1..23: note = RM114832
ttggcccttcgtctnatggacaa

SEQ ID NO: 188 - DNA, 23 bp, synthetic construct
  source 1..23: mol_type = other DNA
  misc_feature 12..13: note = DNA
  misc_feature order(1..11,14..23): note = RNA
  modified_base 11: mod_base = OTHER; note = 2-Prime-O-Methoxyethyl modified 5-methyl Uridine
  modified_base 12: mod_base = OTHER; note = DNA nucleotide carrying a 6-amino-5-nitro-3-yl-2(1H)-pyridone nucleobase
  modified_base order(1..2,6..7,15,17): mod_base = OTHER; note = 2-Prime-Fluoro modified nucleoside
  modified_base order(3..5,8..10,14,16,18..23): mod_base = OTHER; note = 2-Prime-O-Methyl modified nucleoside
  modified_base order(1^2,22^23): mod_base = OTHER; note = (1,3-dimethylimidazolidin-2-ylidene) Phosphoramidate linkage
  modified_base order(2..13,14..22): mod_base = OTHER; note = Phosphorothioate linkage
  modified_base 13^14: mod_base = OTHER; note = Methylphosphonate linkage
  misc_feature 1..23: note = RM114833
gcccttcgtctnatggacaaagt

SEQ ID NO: 189 - DNA, 32 bp, synthetic construct; identical to SEQ ID NO: 74
  source 1..32: mol_type = other DNA
  misc_feature 25..26: note = DNA
  misc_feature order(1..24,27..32): note = RNA
  modified_base 24: mod_base = OTHER; note = 2-Prime-O-Methoxyethyl modified 5-methyl Uridine
  modified_base 25: mod_base = OTHER; note = DNA nucleotide carrying a 6-amino-5-nitro-3-yl-2(1H)-pyridone nucleobase
  modified_base order(14..15,19..20,28,30): mod_base = OTHER; note = 2-Prime-Fluoro modified nucleoside
  modified_base order(1..13,16..18,21..23,27,29,31..32): mod_base = OTHER; note = 2-Prime-O-Methyl modified nucleoside
  modified_base order(1^2,31^32): mod_base = OTHER; note = (1,3-dimethylimidazolidin-2-ylidene) Phosphoramidate linkage
  modified_base order(2..26,27..31): mod_base = OTHER; note = Phosphorothioate linkage
  modified_base 26^27: mod_base = OTHER; note = Methylphosphonate linkage
  misc_feature 1..32: note = RM114834

SEQ ID NO: 190 - DNA, 32 bp, synthetic construct; identical to SEQ ID NO: 75
  source 1..32: mol_type = other DNA
  misc_feature 22..23: note = DNA
  misc_feature order(1..21,24..32): note = RNA
  modified_base 21: mod_base = OTHER; note = 2-Prime-O-Methoxyethyl modified 5-methyl Uridine
  modified_base 22: mod_base = OTHER; note = DNA nucleotide carrying a 6-amino-5-nitro-3-yl-2(1H)-pyridone nucleobase
  modified_base order(11..12,16..17,25,27): mod_base = OTHER; note = 2-Prime-Fluoro modified nucleoside
  modified_base order(1..10,13..15,18..20,24,26,28..32): mod_base = OTHER; note = 2-Prime-O-Methyl modified nucleoside
  modified_base order(1^2,31^32): mod_base = OTHER; note = (1,3-dimethylimidazolidin-2-ylidene) Phosphoramidate linkage
  modified_base order(2..23,24..31): mod_base = OTHER; note = Phosphorothioate linkage
  modified_base 23^24: mod_base = OTHER; note = Methylphosphonate linkage
  misc_feature 1..32: note = RM114835

SEQ ID NO: 191 - DNA, 32 bp, synthetic construct; identical to SEQ ID NO: 76
  source 1..32: mol_type = other DNA
  misc_feature 19..20: note = DNA
  misc_feature order(1..18,21..32): note = RNA
  modified_base 18: mod_base = OTHER; note = 2-Prime-O-Methoxyethyl modified 5-methyl Uridine
  modified_base 19: mod_base = OTHER; note = DNA nucleotide carrying a 6-amino-5-nitro-3-yl-2(1H)-pyridone nucleobase
  modified_base order(8..9,13..14,22,24): mod_base = OTHER; note = 2-Prime-Fluoro modified nucleoside
  modified_base order(1..7,10..12,15..17,21,23,25..32): mod_base = OTHER; note = 2-Prime-O-Methyl modified nucleoside
  modified_base order(1^2,31^32): mod_base = OTHER; note = (1,3-dimethylimidazolidin-2-ylidene) Phosphoramidate linkage
  modified_base order(2..20,21..31): mod_base = OTHER; note = Phosphorothioate linkage
  modified_base 20^21: mod_base = OTHER; note = Methylphosphonate linkage
  misc_feature 1..32: note = RM114836

SEQ ID NO: 192 - DNA, 32 bp, synthetic construct; identical to SEQ ID NO: 77
  source 1..32: mol_type = other DNA
  misc_feature 16..17: note = DNA
  misc_feature order(1..15,18..32): note = RNA
  modified_base 15: mod_base = OTHER; note = 2-Prime-O-Methoxyethyl modified 5-methyl Uridine
  modified_base 16: mod_base = OTHER; note = DNA nucleotide carrying a 6-amino-5-nitro-3-yl-2(1H)-pyridone nucleobase
  modified_base order(5..6,10..11,19,21): mod_base = OTHER; note = 2-Prime-Fluoro modified nucleoside
  modified_base order(1..4,7..9,12..14,18,20,22..32): mod_base = OTHER; note = 2-Prime-O-Methyl modified nucleoside
  modified_base order(1^2,31^32): mod_base = OTHER; note = (1,3-dimethylimidazolidin-2-ylidene) Phosphoramidate linkage
  modified_base order(2..17,18..31): mod_base = OTHER; note = Phosphorothioate linkage
  modified_base 17^18: mod_base = OTHER; note = Methylphosphonate linkage
  misc_feature 1..32: note = RM114837

SEQ ID NO: 193 - DNA, 32 bp, synthetic construct; identical to SEQ ID NO: 78
  source 1..32: mol_type = other DNA
  misc_feature 13..14: note = DNA
  misc_feature order(1..12,15..32): note = RNA
  modified_base 12: mod_base = OTHER; note = 2-Prime-O-Methoxyethyl modified 5-methyl Uridine
  modified_base 13: mod_base = OTHER; note = DNA nucleotide carrying a 6-amino-5-nitro-3-yl-2(1H)-pyridone nucleobase
  modified_base order(2..3,7..8,16,18): mod_base = OTHER; note = 2-Prime-Fluoro modified nucleoside
  modified_base order(1,4..6,9..11,15,17,19..32): mod_base = OTHER; note = 2-Prime-O-Methyl modified nucleoside
  modified_base order(1^2,31^32): mod_base = OTHER; note = (1,3-dimethylimidazolidin-2-ylidene) Phosphoramidate linkage
  modified_base order(2..14,15..31): mod_base = OTHER; note = Phosphorothioate linkage
  modified_base 14^15: mod_base = OTHER; note = Methylphosphonate linkage
  misc_feature 1..32: note = RM114838

SEQ ID NO: 194 - DNA, 23 bp, synthetic construct
  source 1..23: mol_type = other DNA
  misc_feature 9..10: note = DNA
  misc_feature order(1..8,11..23): note = RNA
  modified_base 8: mod_base = OTHER; note = 2-Prime-O-Methoxyethyl modified 5-methyl Uridine
  modified_base 9: mod_base = OTHER; note = DNA nucleotide carrying a 6-amino-5-nitro-3-yl-2(1H)-pyridone nucleobase
  modified_base order(6,12,16..17,21..22): mod_base = OTHER; note = 2-Prime-Fluoro modified nucleoside
  modified_base order(1..5,7,11,13..15,18..20,23): mod_base = OTHER; note = 2-Prime-O-Methyl modified nucleoside
  modified_base order(1^2,22^23): mod_base = OTHER; note = (1,3-dimethylimidazolidin-2-ylidene) Phosphoramidate linkage
  modified_base order(2..10,11..22): mod_base = OTHER; note = Phosphorothioate linkage
  modified_base 10^11: mod_base = OTHER; note = Methylphosphonate linkage
  misc_feature 1..23: note = RM114839
cttcgtctnatggacaaagtctt

SEQ ID NO: 195 - DNA, 23 bp, synthetic construct
  source 1..23: mol_type = other DNA
  misc_feature 6..7: note = DNA
  misc_feature order(1..5,8..23): note = RNA
  modified_base 5: mod_base = OTHER; note = 2-Prime-O-Methoxyethyl modified 5-methyl Uridine
  modified_base 6: mod_base = OTHER; note = DNA nucleotide carrying a 6-amino-5-nitro-3-yl-2(1H)-pyridone nucleobase
  modified_base order(3,9,13..14,18..19): mod_base = OTHER; note = 2-Prime-Fluoro modified nucleoside
  modified_base order(1..2,4,8,10..12,15..17,20..23): mod_base = OTHER; note = 2-Prime-O-Methyl modified nucleoside
  modified_base order(1^2,22^23): mod_base = OTHER; note = (1,3-dimethylimidazolidin-2-ylidene) Phosphoramidate linkage
  modified_base order(2..7,8..22): mod_base = OTHER; note = Phosphorothioate linkage
  modified_base 7^8: mod_base = OTHER; note = Methylphosphonate linkage
  misc_feature 1..23: note = RM114840
cgtctnatggacaaagtctttaa

SEQ ID NO: 196 - DNA, 32 bp, synthetic construct; identical to SEQ ID NO: 76
  source 1..32: mol_type = other DNA
  misc_feature 19..20: note = DNA
  misc_feature order(1..18,21..32): note = RNA
  modified_base 18: mod_base = OTHER; note = 2-Prime-O-Methoxyethyl modified 5-methyl Uridine
  modified_base 19: mod_base = OTHER; note = DNA nucleotide carrying a 6-amino-5-nitro-3-yl-2(1H)-pyridone nucleobase
  modified_base order(16,22,26..27,31..32): mod_base = OTHER; note = 2-Prime-Fluoro modified nucleoside
  modified_base order(1..15,17,21,23..25,28..30): mod_base = OTHER; note = 2-Prime-O-Methyl modified nucleoside
  modified_base order(1^2,31^32): mod_base = OTHER; note = (1,3-dimethylimidazolidin-2-ylidene) Phosphoramidate linkage
  modified_base order(2..20,21..31): mod_base = OTHER; note = Phosphorothioate linkage
  modified_base 20^21: mod_base = OTHER; note = Methylphosphonate linkage
  misc_feature 1..32: note = RM114841

SEQ ID NO: 197 - DNA, 32 bp, synthetic construct; identical to SEQ ID NO: 77
  source 1..32: mol_type = other DNA
  misc_feature 16..17: note = DNA
  misc_feature order(1..15,18..32): note = RNA
  modified_base 15: mod_base = OTHER; note = 2-Prime-O-Methoxyethyl modified 5-methyl Uridine
  modified_base 16: mod_base = OTHER; note = DNA nucleotide carrying a 6-amino-5-nitro-3-yl-2(1H)-pyridone nucleobase
  modified_base order(13,19,23..24,28..29): mod_base = OTHER; note = 2-Prime-Fluoro modified nucleoside
  modified_base order(1..12,14,18,20..22,25..27,30..32): mod_base = OTHER; note = 2-Prime-O-Methyl modified nucleoside
  modified_base order(1^2,31^32): mod_base = OTHER; note = (1,3-dimethylimidazolidin-2-ylidene) Phosphoramidate linkage
  modified_base order(2..17,18..31): mod_base = OTHER; note = Phosphorothioate linkage
  modified_base 17^18: mod_base = OTHER; note = Methylphosphonate linkage
  misc_feature 1..32: note = RM114842

SEQ ID NO: 198 - DNA, 32 bp, synthetic construct; identical to SEQ ID NO: 78
  source 1..32: mol_type = other DNA
  misc_feature 13..14: note = DNA
  misc_feature order(1..12,15..32): note = RNA
  modified_base 12: mod_base = OTHER; note = 2-Prime-O-Methoxyethyl modified 5-methyl Uridine
  modified_base 13: mod_base = OTHER; note = DNA nucleotide carrying a 6-amino-5-nitro-3-yl-2(1H)-pyridone nucleobase
  modified_base order(10,16,20..21,25..26): mod_base = OTHER; note = 2-Prime-Fluoro modified nucleoside
  modified_base order(1..9,11,15,17..19,22..24,27..32): mod_base = OTHER; note = 2-Prime-O-Methyl modified nucleoside
  modified_base order(1^2,31^32): mod_base = OTHER; note = (1,3-dimethylimidazolidin-2-ylidene) Phosphoramidate linkage
  modified_base order(2..14,15..31): mod_base = OTHER; note = Phosphorothioate linkage
  modified_base 14^15: mod_base = OTHER; note = Methylphosphonate linkage
  misc_feature 1..32: note = RM114843

SEQ ID NO: 199 - DNA, 32 bp, synthetic construct; identical to SEQ ID NO: 79
  source 1..32: mol_type = other DNA
  misc_feature 10..11: note = DNA
  misc_feature order(1..9,12..32): note = RNA
  modified_base 9: mod_base = OTHER; note = 2-Prime-O-Methoxyethyl modified 5-methyl Uridine
  modified_base 10: mod_base = OTHER; note = DNA nucleotide carrying a 6-amino-5-nitro-3-yl-2(1H)-pyridone nucleobase
  modified_base order(7,13,17..18,22..23): mod_base = OTHER; note = 2-Prime-Fluoro modified nucleoside
  modified_base order(1..6,8,12,14..16,19..21,24..32): mod_base = OTHER; note = 2-Prime-O-Methyl modified nucleoside
  modified_base order(1^2,31^32): mod_base = OTHER; note = (1,3-dimethylimidazolidin-2-ylidene) Phosphoramidate linkage
  modified_base order(2..11,12..31): mod_base = OTHER; note = Phosphorothioate linkage
  modified_base 11^12: mod_base = OTHER; note = Methylphosphonate linkage
  misc_feature 1..32: note = RM114844

SEQ ID NO: 200 - DNA, 32 bp, synthetic construct; identical to SEQ ID NO: 80
  source 1..32: mol_type = other DNA
  misc_feature 7..8: note = DNA
  misc_feature order(1..6,9..32): note = RNA
  modified_base 6: mod_base = OTHER; note = 2-Prime-O-Methoxyethyl modified 5-methyl Uridine
  modified_base 7: mod_base = OTHER; note = DNA nucleotide carrying a 6-amino-5-nitro-3-yl-2(1H)-pyridone nucleobase
  modified_base order(4,10,14..15,19..20): mod_base = OTHER; note = 2-Prime-Fluoro modified nucleoside
  modified_base order(1..3,5,9,11..13,16..18,21..32): mod_base = OTHER; note = 2-Prime-O-Methyl modified nucleoside
  modified_base order(1^2,31^32): mod_base = OTHER; note = (1,3-dimethylimidazolidin-2-ylidene) Phosphoramidate linkage
  modified_base order(2..8,9..31): mod_base = OTHER; note = Phosphorothioate linkage
  modified_base 8^9: mod_base = OTHER; note = Methylphosphonate linkage
  misc_feature 1..32: note = RM114845

SEQ ID NO: 201 - DNA, 32 bp, synthetic construct; identical to SEQ ID NO: 73
  source 1..32: mol_type = other DNA
  misc_feature 28..29: note = DNA
  misc_feature order(1..27,30..32): note = RNA
  modified_base 27: mod_base = OTHER; note = 2-Prime-O-Methoxyethyl modified 5-methyl Uridine
  modified_base 28: mod_base = OTHER; note = DNA nucleotide carrying a 6-amino-5-nitro-3-yl-2(1H)-pyridone nucleobase
  modified_base order(22..23,31): mod_base = OTHER; note = 2-Prime-Fluoro modified nucleoside
  modified_base order(1..21,24..26,30,32): mod_base = OTHER; note = 2-Prime-O-Methyl modified nucleoside
  modified_base order(1^2,31^32): mod_base = OTHER; note = (1,3-dimethylimidazolidin-2-ylidene) Phosphoramidate linkage
  modified_base order(2..29,30^31): mod_base = OTHER; note = Phosphorothioate linkage
  modified_base 29^30: mod_base = OTHER; note = Methylphosphonate linkage
  misc_feature 1..32: note = RM114846

SEQ ID NO: 202 - DNA, 32 bp, synthetic construct; identical to SEQ ID NO: 74
  source 1..32: mol_type = other DNA
  misc_feature 25..26: note = DNA
  misc_feature order(1..24,27..32): note = RNA
  modified_base 24: mod_base = OTHER; note = 2-Prime-O-Methoxyethyl modified 5-methyl Uridine
  modified_base 25: mod_base = OTHER; note = DNA nucleotide carrying a 6-amino-5-nitro-3-yl-2(1H)-pyridone nucleobase
  modified_base order(19..20,28): mod_base = OTHER; note = 2-Prime-Fluoro modified nucleoside
  modified_base order(1..18,21..23,27,29..32): mod_base = OTHER; note = 2-Prime-O-Methyl modified nucleoside
  modified_base order(1^2,31^32): mod_base = OTHER; note = (1,3-dimethylimidazolidin-2-ylidene) Phosphoramidate linkage
  modified_base order(2..26,27..31): mod_base = OTHER; note = Phosphorothioate linkage
  modified_base 26^27: mod_base = OTHER; note = Methylphosphonate linkage
  misc_feature 1..32: note = RM114847

SEQ ID NO: 203 - DNA, 32 bp, synthetic construct; identical to SEQ ID NO: 75
  source 1..32: mol_type = other DNA
  misc_feature 22..23: note = DNA
  misc_feature order(1..21,24..32): note = RNA
  modified_base 21: mod_base = OTHER; note = 2-Prime-O-Methoxyethyl modified 5-methyl Uridine
  modified_base 22: mod_base = OTHER; note = DNA nucleotide carrying a 6-amino-5-nitro-3-yl-2(1H)-pyridone nucleobase
  modified_base order(16..17,25): mod_base = OTHER; note = 2-Prime-Fluoro modified nucleoside
  modified_base order(1..15,18..20,24,26..32): mod_base = OTHER; note = 2-Prime-O-Methyl modified nucleoside
  modified_base order(1^2,31^32): mod_base = OTHER; note = (1,3-dimethylimidazolidin-2-ylidene) Phosphoramidate linkage
  modified_base order(2..23,24..31): mod_base = OTHER; note = Phosphorothioate linkage
  modified_base 23^24: mod_base = OTHER; note = Methylphosphonate linkage
  misc_feature 1..32: note = RM114848

SEQ ID NO: 204 - DNA, 32 bp, synthetic construct; identical to SEQ ID NO: 76
  source 1..32: mol_type = other DNA
  misc_feature 19..20: note = DNA
  misc_feature order(1..18,21..32): note = RNA
  modified_base 18: mod_base = OTHER; note = 2-Prime-O-Methoxyethyl modified 5-methyl Uridine
  modified_base 19: mod_base = OTHER; note = DNA nucleotide carrying a 6-amino-5-nitro-3-yl-2(1H)-pyridone nucleobase
  modified_base order(13..14,22): mod_base = OTHER; note = 2-Prime-Fluoro modified nucleoside
  modified_base order(1..12,15..17,21,23..32): mod_base = OTHER; note = 2-Prime-O-Methyl modified nucleoside
  modified_base order(1^2,31^32): mod_base = OTHER; note = (1,3-dimethylimidazolidin-2-ylidene) Phosphoramidate linkage
  modified_base order(2..20,21..31): mod_base = OTHER; note = Phosphorothioate linkage
  modified_base 20^21: mod_base = OTHER; note = Methylphosphonate linkage
  misc_feature 1..32: note = RM114849

SEQ ID NO: 205 - DNA, 32 bp, synthetic construct; identical to SEQ ID NO: 77
  source 1..32: mol_type = other DNA
  misc_feature 16..17: note = DNA
  misc_feature order(1..15,18..32): note = RNA
  modified_base 15: mod_base = OTHER; note = 2-Prime-O-Methoxyethyl modified 5-methyl Uridine
  modified_base 16: mod_base = OTHER; note = DNA nucleotide carrying a 6-amino-5-nitro-3-yl-2(1H)-pyridone nucleobase
  modified_base order(10..11,19): mod_base = OTHER; note = 2-Prime-Fluoro modified nucleoside
  modified_base order(1..9,12..14,18,20..32): mod_base = OTHER; note = 2-Prime-O-Methyl modified nucleoside
  modified_base order(1^2,31^32): mod_base = OTHER; note = (1,3-dimethylimidazolidin-2-ylidene) Phosphoramidate linkage
  modified_base order(2..17,18..31): mod_base = OTHER; note = Phosphorothioate linkage
  modified_base 17^18: mod_base = OTHER; note = Methylphosphonate linkage
  misc_feature 1..32: note = RM114850

SEQ ID NO: 206 - DNA, 32 bp, synthetic construct; identical to SEQ ID NO: 78
  source 1..32: mol_type = other DNA
  misc_feature 13..14: note = DNA
  misc_feature order(1..12,15..32): note = RNA
  modified_base 12: mod_base = OTHER; note = 2-Prime-O-Methoxyethyl modified 5-methyl Uridine
  modified_base 13: mod_base = OTHER; note = DNA nucleotide carrying a 6-amino-5-nitro-3-yl-2(1H)-pyridone nucleobase
  modified_base order(7..8,16): mod_base = OTHER; note = 2-Prime-Fluoro modified nucleoside
  modified_base order(1..6,9..11,15,17..32): mod_base = OTHER; note = 2-Prime-O-Methyl modified nucleoside
  modified_base order(1^2,31^32): mod_base = OTHER; note = (1,3-dimethylimidazolidin-2-ylidene) Phosphoramidate linkage
  modified_base order(2..14,15..31): mod_base = OTHER; note = Phosphorothioate linkage
  modified_base 14^15: mod_base = OTHER; note = Methylphosphonate linkage
  misc_feature 1..32: note = RM114851

SEQ ID NO: 207 - DNA, 32 bp, synthetic construct; identical to SEQ ID NO: 79
  source 1..32: mol_type = other DNA
  misc_feature 10..11: note = DNA
  misc_feature order(1..9,12..32): note = RNA
  modified_base 9: mod_base = OTHER; note = 2-Prime-O-Methoxyethyl modified 5-methyl Uridine
  modified_base 10: mod_base = OTHER; note = DNA nucleotide carrying a 6-amino-5-nitro-3-yl-2(1H)-pyridone nucleobase
  modified_base order(4..5,13): mod_base = OTHER; note = 2-Prime-Fluoro modified nucleoside
  modified_base order(1..3,6..8,12,14..32): mod_base = OTHER; note = 2-Prime-O-Methyl modified nucleoside
  modified_base order(1^2,31^32): mod_base = OTHER; note = (1,3-dimethylimidazolidin-2-ylidene) Phosphoramidate linkage
  modified_base order(2..11,12..31): mod_base = OTHER; note = Phosphorothioate linkage
  modified_base 11^12: mod_base = OTHER; note = Methylphosphonate linkage
  misc_feature 1..32: note = RM114852

SEQ ID NO: 208 - DNA, 32 bp, synthetic construct; identical to SEQ ID NO: 80
  source 1..32: mol_type = other DNA
  misc_feature 7..8: note = DNA
  misc_feature order(1..6,9..32): note = RNA
  modified_base 6: mod_base = OTHER; note = 2-Prime-O-Methoxyethyl modified 5-methyl Uridine
  modified_base 7: mod_base = OTHER; note = DNA nucleotide carrying a 6-amino-5-nitro-3-yl-2(1H)-pyridone nucleobase
  modified_base order(1..2,10): mod_base = OTHER; note = 2-Prime-Fluoro modified nucleoside
  modified_base order(3..5,9,11..32): mod_base = OTHER; note = 2-Prime-O-Methyl modified nucleoside
  modified_base order(1^2,31^32): mod_base = OTHER; note = (1,3-dimethylimidazolidin-2-ylidene) Phosphoramidate linkage
  modified_base order(2..8,9..31): mod_base = OTHER; note = Phosphorothioate linkage
  modified_base 8^9: mod_base = OTHER; note = Methylphosphonate linkage
  misc_feature 1..32: note = RM114853

SEQ ID NO: 209 - DNA, 26 bp, synthetic construct
  source 1..26: mol_type = other DNA
  misc_feature 22..23: note = DNA
  misc_feature order(1..21,24..26): note = RNA
  modified_base 21: mod_base = OTHER; note = 2-Prime-O-Methoxyethyl modified 5-methyl Uridine
  modified_base 22: mod_base = OTHER; note = DNA nucleotide carrying a 6-amino-5-nitro-3-yl-2(1H)-pyridone nucleobase
  modified_base order(1,3,9,12,14,20,25): mod_base = OTHER; note = 2-Prime-Fluoro modified nucleoside
  modified_base order(2,4..8,10..11,13,15..19,24,26): mod_base = OTHER; note = 2-Prime-O-Methyl modified nucleoside
  modified_base order(1^2,25^26): mod_base = OTHER; note = (1,3-dimethylimidazolidin-2-ylidene) Phosphoramidate linkage
  modified_base order(2..23,24^25): mod_base = OTHER; note = Phosphorothioate linkage
  modified_base 23^24: mod_base = OTHER; note = Methylphosphonate linkage
  misc_feature 1..26: note = RM114854
cattaatttggcccttcgtctnatgg

SEQ ID NO: 210 - DNA, 26 bp, synthetic construct
  source 1..26: mol_type = other DNA
  misc_feature 22..23: note = DNA
  misc_feature order(1..21,24..26): note = RNA
  modified_base 21: mod_base = OTHER; note = 2-Prime-O-Methoxyethyl modified 5-methyl Uridine
  modified_base 22: mod_base = OTHER; note = DNA nucleotide carrying a 6-amino-5-nitro-3-yl-2(1H)-pyridone nucleobase
  modified_base order(9,12,14,20,25): mod_base = OTHER; note = 2-Prime-Fluoro modified nucleoside
  modified_base order(1..8,10..11,13,15..19,24,26): mod_base = OTHER; note = 2-Prime-O-Methyl modified nucleoside
  modified_base order(1^2,25^26): mod_base = OTHER; note = (1,3-dimethylimidazolidin-2-ylidene) Phosphoramidate linkage
  modified_base order(2..23,24^25): mod_base = OTHER; note = Phosphorothioate linkage
  modified_base 23^24: mod_base = OTHER; note = Methylphosphonate linkage
  misc_feature 1..26: note = RM114855
cattaatttggcccttcgtctnatgg

SEQ ID NO: 211 - DNA, 26 bp, synthetic construct
  source 1..26: mol_type = other DNA
  misc_feature 19..20: note = DNA
  misc_feature order(1..18,21..26): note = RNA
  modified_base 18: mod_base = OTHER; note = 2-Prime-O-Methoxyethyl modified 5-methyl Uridine
  modified_base 19: mod_base = OTHER; note = DNA nucleotide carrying a 6-amino-5-nitro-3-yl-2(1H)-pyridone nucleobase
  modified_base order(6,9,11,17,22): mod_base = OTHER; note = 2-Prime-Fluoro modified nucleoside
  modified_base order(1..5,7..8,10,12..16,21,23..26): mod_base = OTHER; note = 2-Prime-O-Methyl modified nucleoside
  modified_base order(1^2,25^26): mod_base = OTHER; note = (1,3-dimethylimidazolidin-2-ylidene) Phosphoramidate linkage
  modified_base order(2..20,21..25): mod_base = OTHER; note = Phosphorothioate linkage
  modified_base 20^21: mod_base = OTHER; note = Methylphosphonate linkage
  misc_feature 1..26: note = RM114856
taatttggcccttcgtctnatggaca

SEQ ID NO: 212 - DNA, 26 bp, synthetic construct
  source 1..26: mol_type = other DNA
  misc_feature 16..17: note = DNA
  misc_feature order(1..15,18..26): note = RNA
  modified_base 15: mod_base = OTHER; note = 2-Prime-O-Methoxyethyl modified 5-methyl Uridine
  modified_base 16: mod_base = OTHER; note = DNA nucleotide carrying a 6-amino-5-nitro-3-yl-2(1H)-pyridone nucleobase
  modified_base order(3,6,8,14,19): mod_base = OTHER; note = 2-Prime-Fluoro modified nucleoside
  modified_base order(1..2,4..5,7,9..13,18,20..26): mod_base = OTHER; note = 2-Prime-O-Methyl modified nucleoside
  modified_base order(1^2,25^26): mod_base = OTHER; note = (1,3-dimethylimidazolidin-2-ylidene) Phosphoramidate linkage
  modified_base order(2..17,18..25): mod_base = OTHER; note = Phosphorothioate linkage
  modified_base 17^18: mod_base = OTHER; note = Methylphosphonate linkage
  misc_feature 1..26: note = RM114857
tttggcccttcgtctnatggacaaag

SEQ ID NO: 213 - DNA, 29 bp, synthetic construct
  source 1..29: mol_type = other DNA
  misc_feature 24..25: note = DNA
  misc_feature order(1..23,26..29): note = RNA
  modified_base 23: mod_base = OTHER; note = 2-Prime-O-Methoxyethyl modified 5-methyl Uridine
  modified_base 24: mod_base = OTHER; note = DNA nucleotide carrying a 6-amino-5-nitro-3-yl-2(1H)-pyridone nucleobase
  modified_base order(11,14,16,22,27): mod_base = OTHER; note = 2-Prime-Fluoro modified nucleoside
  modified_base order(1..10,12..13,15,17..21,26,28..29): mod_base = OTHER; note = 2-Prime-O-Methyl modified nucleoside
  modified_base order(1^2,28^29): mod_base = OTHER; note = (1,3-dimethylimidazolidin-2-ylidene) Phosphoramidate linkage
  modified_base order(2..25,26..28): mod_base = OTHER; note = Phosphorothioate linkage
  modified_base 25^26: mod_base = OTHER; note = Methylphosphonate linkage
  misc_feature 1..29: note = RM114858
gtcattaatttggcccttcgtctnatgga

SEQ ID NO: 214 - DNA, 29 bp, synthetic construct
  source 1..29: mol_type = other DNA
  misc_feature 21..22: note = DNA
  misc_feature order(1..20,23..29): note = RNA
  modified_base 20: mod_base = OTHER; note = 2-Prime-O-Methoxyethyl modified 5-methyl Uridine
  modified_base 21: mod_base = OTHER; note = DNA nucleotide carrying a 6-amino-5-nitro-3-yl-2(1H)-pyridone nucleobase
  modified_base order(8,11,13,19,24): mod_base = OTHER; note = 2-Prime-Fluoro modified nucleoside
  modified_base order(1..7,9..10,12,14..18,23,25..29): mod_base = OTHER; note = 2-Prime-O-Methyl modified nucleoside
  modified_base order(1^2,28^29): mod_base = OTHER; note = (1,3-dimethylimidazolidin-2-ylidene) Phosphoramidate linkage
  modified_base order(2..22,23..28): mod_base = OTHER; note = Phosphorothioate linkage
  modified_base 22^23: mod_base = OTHER; note = Methylphosphonate linkage
  misc_feature 1..29: note = RM114859
attaatttggcccttcgtctnatggacaa

SEQ ID NO: 215 - DNA, 29 bp, synthetic construct
  source 1..29: mol_type = other DNA
  misc_feature 18..19: note = DNA
  misc_feature order(1..17,20..29): note = RNA
  modified_base 17: mod_base = OTHER; note = 2-Prime-O-Methoxyethyl modified 5-methyl Uridine
  modified_base 18: mod_base = OTHER; note = DNA nucleotide carrying a 6-amino-5-nitro-3-yl-2(1H)-pyridone nucleobase
  modified_base order(5,8,10,16,21): mod_base = OTHER; note = 2-Prime-Fluoro modified nucleoside
  modified_base order(1..4,6..7,9,11..15,20,22..29): mod_base = OTHER; note = 2-Prime-O-Methyl modified nucleoside
  modified_base order(1^2,28^29): mod_base = OTHER; note = (1,3-dimethylimidazolidin-2-ylidene) Phosphoramidate linkage
  modified_base order(2..19,20..28): mod_base = OTHER; note = Phosphorothioate linkage
  modified_base 19^20: mod_base = OTHER; note = Methylphosphonate linkage
  misc_feature 1..29: note = RM114860
aatttggcccttcgtctnatggacaaagt

SEQ ID NO: 216 - DNA, 29 bp, synthetic construct
  source 1..29: mol_type = other DNA
  misc_feature 15..16: note = DNA
  misc_feature order(1..14,17..29): note = RNA
  modified_base 14: mod_base = OTHER; note = 2-Prime-O-Methoxyethyl modified 5-methyl Uridine
  modified_base 15: mod_base = OTHER; note = DNA nucleotide carrying a 6-amino-5-nitro-3-yl-2(1H)-pyridone nucleobase
  modified_base order(2,5,7,13,18): mod_base = OTHER; note = 2-Prime-Fluoro modified nucleoside
  modified_base order(1,3..4,6,8..12,17,19..29): mod_base = OTHER; note = 2-Prime-O-Methyl modified nucleoside
  modified_base order(1^2,28^29): mod_base = OTHER; note = (1,3-dimethylimidazolidin-2-ylidene) Phosphoramidate linkage
  modified_base order(2..16,17..28): mod_base = OTHER; note = Phosphorothioate linkage
  modified_base 16^17: mod_base = OTHER; note = Methylphosphonate linkage
  misc_feature 1..29: note = RM114861
ttggcccttcgtctnatggacaaagtctt

SEQ ID NO: 217 - DNA, 32 bp, synthetic construct; identical to SEQ ID NO: 74
  source 1..32: mol_type = other DNA
  misc_feature 25..26: note = DNA
  misc_feature order(1..24,27..32): note = RNA
  modified_base 24: mod_base = OTHER; note = 2-Prime-O-Methoxyethyl modified 5-methyl Uridine
  modified_base 25: mod_base = OTHER; note = DNA nucleotide carrying a 6-amino-5-nitro-3-yl-2(1H)-pyridone nucleobase
  modified_base order(2,11,16,20,22..23,28..30): mod_base = OTHER; note = 2-Prime-Fluoro modified nucleoside
  modified_base order(1,3..10,12..15,17..19,21,27,31..32): mod_base = OTHER; note = 2-Prime-O-Methyl modified nucleoside
  modified_base order(1^2,31^32): mod_base = OTHER; note = (1,3-dimethylimidazolidin-2-ylidene) Phosphoramidate linkage
  modified_base order(2..26,27..31): mod_base = OTHER; note = Phosphorothioate linkage
  modified_base 26^27: mod_base = OTHER; note = Methylphosphonate linkage
  misc_feature 1..32: note = RM114862

SEQ ID NO: 218 - DNA, 32 bp, synthetic construct; identical to SEQ ID NO: 80
  source 1..32: mol_type = other DNA
  misc_feature 7..8: note = DNA
  misc_feature order(1..6,9..32): note = RNA
  modified_base 6: mod_base = OTHER; note = 2-Prime-O-Methoxyethyl modified 5-methyl Uridine
  modified_base 7: mod_base = OTHER; note = DNA nucleotide carrying a 6-amino-5-nitro-3-yl-2(1H)-pyridone nucleobase
  modified_base order(4..5,10..12,14,18,23,32): mod_base = OTHER; note = 2-Prime-Fluoro modified nucleoside
  modified_base order(1..3,9,13,15..17,19..22,24..31): mod_base = OTHER; note = 2-Prime-O-Methyl modified nucleoside
  modified_base order(1^2,31^32): mod_base = OTHER; note = (1,3-dimethylimidazolidin-2-ylidene) Phosphoramidate linkage
  modified_base order(2..8,9..31): mod_base = OTHER; note = Phosphorothioate linkage
  modified_base 8^9: mod_base = OTHER; note = Methylphosphonate linkage
  misc_feature 1..32: note = RM114863

SEQ ID NO: 219 - DNA, 23 bp, synthetic construct
  source 1..23: mol_type = other DNA
  misc_feature 18..19: note = DNA
  misc_feature order(1..17,20..23): note = RNA
  modified_base 17: mod_base = OTHER; note = 2-Prime-O-Methoxyethyl modified 5-methyl Uridine
  modified_base 18: mod_base = OTHER; note = DNA nucleotide carrying a 6-amino-5-nitro-3-yl-2(1H)-pyridone nucleobase
  modified_base order(13,15..16,21..23): mod_base = OTHER; note = 2-Prime-Fluoro modified nucleoside
  modified_base order(1..12,14,20): mod_base = OTHER; note = 2-Prime-O-Methyl modified nucleoside
  modified_base order(1^2,22^23): mod_base = OTHER; note = (1,3-dimethylimidazolidin-2-ylidene) Phosphoramidate linkage
  modified_base order(2..19,20..22): mod_base = OTHER; note = Phosphorothioate linkage
  modified_base 19^20: mod_base = OTHER; note = Methylphosphonate linkage
  misc_feature 1..23: note = RM114864
aatttggcccttcgtctnatgga

SEQ ID NO: 220 - DNA, 23 bp, synthetic construct
  source 1..23: mol_type = other DNA
  misc_feature 15..16: note = DNA
  misc_feature order(1..14,17..23): note = RNA
  modified_base 14: mod_base = OTHER; note = 2-Prime-O-Methoxyethyl modified 5-methyl Uridine
  modified_base 15: mod_base = OTHER; note = DNA nucleotide carrying a 6-amino-5-nitro-3-yl-2(1H)-pyridone nucleobase
  modified_base order(10,12..13,18..20): mod_base = OTHER; note = 2-Prime-Fluoro modified nucleoside
  modified_base order(1..9,11,17,21..23): mod_base = OTHER; note = 2-Prime-O-Methyl modified nucleoside
  modified_base order(1^2,22^23): mod_base = OTHER; note = (1,3-dimethylimidazolidin-2-ylidene) Phosphoramidate linkage
  modified_base order(2..16,17..22): mod_base = OTHER; note = Phosphorothioate linkage
  modified_base 16^17: mod_base = OTHER; note = Methylphosphonate linkage
  misc_feature 1..23: note = RM114865
ttggcccttcgtctnatggacaa

SEQ ID NO: 221 - DNA, 23 bp, synthetic construct
  source 1..23: mol_type = other DNA
  misc_feature 12..13: note = DNA
  misc_feature order(1..11,14..23): note = RNA
  modified_base 11: mod_base = OTHER; note = 2-Prime-O-Methoxyethyl modified 5-methyl Uridine
  modified_base 12: mod_base = OTHER; note = DNA nucleotide carrying a 6-amino-5-nitro-3-yl-2(1H)-pyridone nucleobase
  modified_base order(7,9..10,15..17): mod_base = OTHER; note = 2-Prime-Fluoro modified nucleoside
  modified_base order(1..6,8,14,18..23): mod_base = OTHER; note = 2-Prime-O-Methyl modified nucleoside
  modified_base order(1^2,22^23): mod_base = OTHER; note = (1,3-dimethylimidazolidin-2-ylidene) Phosphoramidate linkage
  modified_base order(2..13,14..22): mod_base = OTHER; note = Phosphorothioate linkage
  modified_base 13^14: mod_base = OTHER; note = Methylphosphonate linkage
  misc_feature 1..23: note = RM114866
gcccttcgtctnatggacaaagt

SEQ ID NO: 222 - DNA, 23 bp, synthetic construct
  source 1..23: mol_type = other DNA
  misc_feature 9..10: note = DNA
  misc_feature order(1..8,11..23): note = RNA
  modified_base 8: mod_base = OTHER; note = 2-Prime-O-Methoxyethyl modified 5-methyl Uridine
  modified_base 9: mod_base = OTHER; note = DNA nucleotide carrying a 6-amino-5-nitro-3-yl-2(1H)-pyridone nucleobase
  modified_base order(4,6..7,12..14): mod_base = OTHER; note = 2-Prime-Fluoro modified nucleoside
  modified_base order(1..3,5,11,15..23): mod_base = OTHER; note = 2-Prime-O-Methyl modified nucleoside
  modified_base order(1^2,22^23): mod_base = OTHER; note = (1,3-dimethylimidazolidin-2-ylidene) Phosphoramidate linkage
  modified_base order(2..10,11..22): mod_base = OTHER; note = Phosphorothioate linkage
  modified_base 10^11: mod_base = OTHER; note = Methylphosphonate linkage
  misc_feature 1..23: note = RM114867
cttcgtctnatggacaaagtctt

SEQ ID NO: 223 - DNA, 23 bp, synthetic construct
  source 1..23: mol_type = other DNA
  misc_feature 6..7: note = DNA
  misc_feature order(1..5,8..23): note = RNA
  modified_base 5: mod_base = OTHER; note = 2-Prime-O-Methoxyethyl modified 5-methyl Uridine
  modified_base 6: mod_base = OTHER; note = DNA nucleotide carrying a 6-amino-5-nitro-3-yl-2(1H)-pyridone nucleobase
  modified_base order(1,3..4,9..11): mod_base = OTHER; note = 2-Prime-Fluoro modified nucleoside
  modified_base order(2,8,12..23): mod_base = OTHER; note = 2-Prime-O-Methyl modified nucleoside
  modified_base order(1^2,22^23): mod_base = OTHER; note = (1,3-dimethylimidazolidin-2-ylidene) Phosphoramidate linkage
  modified_base order(2..7,8..22): mod_base = OTHER; note = Phosphorothioate linkage
  modified_base 7^8: mod_base = OTHER; note = Methylphosphonate linkage
  misc_feature 1..23: note = RM114868
cgtctnatggacaaagtctttaa

SEQ ID NO: 224 - DNA, 32 bp, synthetic construct; identical to SEQ ID NO: 74
  source 1..32: mol_type = other DNA
  misc_feature 25..26: note = DNA
  misc_feature order(1..24,27..32): note = RNA
  modified_base 24: mod_base = OTHER; note = 2-Prime-O-Methoxyethyl modified 5-methyl Uridine
  modified_base 25: mod_base = OTHER; note = DNA nucleotide carrying a 6-amino-5-nitro-3-yl-2(1H)-pyridone nucleobase
  modified_base order(20,22..23,28..30): mod_base = OTHER; note = 2-Prime-Fluoro modified nucleoside
  modified_base order(1..19,21,27,31..32): mod_base = OTHER; note = 2-Prime-O-Methyl modified nucleoside
  modified_base order(1^2,31^32): mod_base = OTHER; note = (1,3-dimethylimidazolidin-2-ylidene) Phosphoramidate linkage
  modified_base order(2..26,27..31): mod_base = OTHER; note = Phosphorothioate linkage
  modified_base 26^27: mod_base = OTHER; note = Methylphosphonate linkage
  misc_feature 1..32: note = RM114869

SEQ ID NO: 225 - DNA, 32 bp, synthetic construct; identical to SEQ ID NO: 75
  source 1..32: mol_type = other DNA
  misc_feature 22..23: note = DNA
  misc_feature order(1..21,24..32): note = RNA
  modified_base 21: mod_base = OTHER; note = 2-Prime-O-Methoxyethyl modified 5-methyl Uridine
  modified_base 22: mod_base = OTHER; note = DNA nucleotide carrying a 6-amino-5-nitro-3-yl-2(1H)-pyridone nucleobase
  modified_base order(17,19..20,25..27): mod_base = OTHER; note = 2-Prime-Fluoro modified nucleoside
  modified_base order(1..16,18,24,28..32): mod_base = OTHER; note = 2-Prime-O-Methyl modified nucleoside
  modified_base order(1^2,31^32): mod_base = OTHER; note = (1,3-dimethylimidazolidin-2-ylidene) Phosphoramidate linkage
  modified_base order(2..23,24..31): mod_base = OTHER; note = Phosphorothioate linkage
  modified_base 23^24: mod_base = OTHER; note = Methylphosphonate linkage
  misc_feature 1..32: note = RM114870

SEQ ID NO: 226 - DNA, 32 bp, synthetic construct; identical to SEQ ID NO: 76
  source 1..32: mol_type = other DNA
  misc_feature 19..20: note = DNA
  misc_feature order(1..18,21..32): note = RNA
  modified_base 18: mod_base = OTHER; note = 2-Prime-O-Methoxyethyl modified 5-methyl Uridine
  modified_base 19: mod_base = OTHER; note = DNA nucleotide carrying a 6-amino-5-nitro-3-yl-2(1H)-pyridone nucleobase
  modified_base order(14,16..17,22..24): mod_base = OTHER; note = 2-Prime-Fluoro modified nucleoside
  modified_base order(1..13,15,21,25..32): mod_base = OTHER; note = 2-Prime-O-Methyl modified nucleoside
  modified_base order(1^2,31^32): mod_base = OTHER; note = (1,3-dimethylimidazolidin-2-ylidene) Phosphoramidate linkage
  modified_base order(2..20,21..31): mod_base = OTHER; note = Phosphorothioate linkage
  modified_base 20^21: mod_base = OTHER; note = Methylphosphonate linkage
  misc_feature 1..32: note = RM114871

SEQ ID NO: 227 - DNA, 32 bp, synthetic construct; identical to SEQ ID NO: 77
  source 1..32: mol_type = other DNA
  misc_feature 16..17: note = DNA
  misc_feature order(1..15,18..32): note = RNA
  modified_base 15: mod_base = OTHER; note = 2-Prime-O-Methoxyethyl modified 5-methyl Uridine
  modified_base 16: mod_base = OTHER; note = DNA nucleotide carrying a 6-amino-5-nitro-3-yl-2(1H)-pyridone nucleobase
  modified_base order(11,13..14,19..21): mod_base = OTHER; note = 2-Prime-Fluoro modified nucleoside
  modified_base order(1..10,12,18,22..32): mod_base = OTHER; note = 2-Prime-O-Methyl modified nucleoside
  modified_base order(1^2,31^32): mod_base = OTHER; note = (1,3-dimethylimidazolidin-2-ylidene) Phosphoramidate linkage
  modified_base order(2..17,18..31): mod_base = OTHER; note = Phosphorothioate linkage
  modified_base 17^18: mod_base = OTHER; note = Methylphosphonate linkage
  misc_feature 1..32: note = RM114872

SEQ ID NO: 228 - DNA, 32 bp, synthetic construct; identical to SEQ ID NO: 78
  source 1..32: mol_type = other DNA
  misc_feature 13..14: note = DNA
  misc_feature order(1..12,15..32): note = RNA
  modified_base 12: mod_base = OTHER; note = 2-Prime-O-Methoxyethyl modified 5-methyl Uridine
  modified_base 13: mod_base = OTHER; note = DNA nucleotide carrying a 6-amino-5-nitro-3-yl-2(1H)-pyridone nucleobase
  modified_base order(8,10..11,16..18): mod_base = OTHER; note = 2-Prime-Fluoro modified nucleoside
  modified_base order(1..7,9,15,19..32): mod_base = OTHER; note = 2-Prime-O-Methyl modified nucleoside
  modified_base order(1^2,31^32): mod_base = OTHER; note = (1,3-dimethylimidazolidin-2-ylidene) Phosphoramidate linkage
  modified_base order(2..14,15..31): mod_base = OTHER; note = Phosphorothioate linkage
  modified_base 14^15: mod_base = OTHER; note = Methylphosphonate linkage
  misc_feature 1..32: note = RM114873

SEQ ID NO: 229 - DNA, 32 bp, synthetic construct; identical to SEQ ID NO: 79
  source 1..32: mol_type = other DNA
  misc_feature 10..11: note = DNA
  misc_feature order(1..9,12..32): note = RNA
  modified_base 9: mod_base = OTHER; note = 2-Prime-O-Methoxyethyl modified 5-methyl Uridine
  modified_base 10: mod_base = OTHER; note = DNA nucleotide carrying a 6-amino-5-nitro-3-yl-2(1H)-pyridone nucleobase
  modified_base order(5,7..8,13..15): mod_base = OTHER; note = 2-Prime-Fluoro modified nucleoside
  modified_base order(1..4,6,12,16..32): mod_base = OTHER; note = 2-Prime-O-Methyl modified nucleoside
  modified_base order(1^2,31^32): mod_base = OTHER; note = (1,3-dimethylimidazolidin-2-ylidene) Phosphoramidate linkage
  modified_base order(2..11,12..31): mod_base = OTHER; note = Phosphorothioate linkage
  modified_base 11^12: mod_base = OTHER; note = Methylphosphonate linkage
  misc_feature 1..32: note = RM114874

SEQ ID NO: 230 - DNA, 32 bp, synthetic construct; identical to SEQ ID NO: 80
  source 1..32: mol_type = other DNA
  misc_feature 7..8: note = DNA
  misc_feature order(1..6,9..32): note = RNA
  modified_base 6: mod_base = OTHER; note = 2-Prime-O-Methoxyethyl modified 5-methyl Uridine
  modified_base 7: mod_base = OTHER; note = DNA nucleotide carrying a 6-amino-5-nitro-3-yl-2(1H)-pyridone nucleobase
  modified_base order(2,4..5,10..12): mod_base = OTHER; note = 2-Prime-Fluoro modified nucleoside
  modified_base order(1,3,9,13..32): mod_base = OTHER; note = 2-Prime-O-Methyl modified nucleoside
  modified_base order(1^2,31^32): mod_base = OTHER; note = (1,3-dimethylimidazolidin-2-ylidene) Phosphoramidate linkage
  modified_base order(2..8,9..31): mod_base = OTHER; note = Phosphorothioate linkage
  modified_base 8^9: mod_base = OTHER; note = Methylphosphonate linkage
  misc_feature 1..32: note = RM114875

SEQ ID NO: 231 - DNA, 23 bp, synthetic construct
  source 1..23: mol_type = other DNA
  misc_feature 15..16: note = DNA
  misc_feature order(1..14,17..23): note = RNA
  modified_base 14: mod_base = OTHER; note = 2-Prime-O-Methoxyethyl modified 5-methyl Uridine
  modified_base 15: mod_base = OTHER; note = DNA nucleotide carrying a 6-amino-5-nitro-3-yl-2(1H)-pyridone nucleobase
  modified_base order(12..13,18..20,22): mod_base = OTHER; note = 2-Prime-Fluoro modified nucleoside
  modified_base order(1..11,17,21,23): mod_base = OTHER; note = 2-Prime-O-Methyl modified nucleoside
  modified_base order(1^2,22^23): mod_base = OTHER; note = (1,3-dimethylimidazolidin-2-ylidene) Phosphoramidate linkage
  modified_base order(2..16,17..22): mod_base = OTHER; note = Phosphorothioate linkage
  modified_base 16^17: mod_base = OTHER; note = Methylphosphonate linkage
  misc_feature 1..23: note = RM114876
ttggcccttcgtctnatggacaa

SEQ ID NO: 232 - DNA, 23 bp, synthetic construct
  source 1..23: mol_type = other DNA
  misc_feature 12..13: note = DNA
  misc_feature order(1..11,14..23): note = RNA
  modified_base 11: mod_base = OTHER; note = 2-Prime-O-Methoxyethyl modified 5-methyl Uridine
  modified_base 12: mod_base = OTHER; note = DNA nucleotide carrying a 6-amino-5-nitro-3-yl-2(1H)-pyridone nucleobase
  modified_base order(9..10,15..17,19): mod_base = OTHER; note = 2-Prime-Fluoro modified nucleoside
  modified_base order(1..8,14,18,20..23): mod_base = OTHER; note = 2-Prime-O-Methyl modified nucleoside
  modified_base order(1^2,22^23): mod_base = OTHER; note = (1,3-dimethylimidazolidin-2-ylidene) Phosphoramidate linkage
  modified_base order(2..13,14..22): mod_base = OTHER; note = Phosphorothioate linkage
  modified_base 13^14: mod_base = OTHER; note = Methylphosphonate linkage
  misc_feature 1..23: note = RM114877
gcccttcgtctnatggacaaagt

SEQ ID NO: 233 - DNA, 23 bp, synthetic construct
  source 1..23: mol_type = other DNA
  misc_feature 9..10: note = DNA
  misc_feature order(1..8,11..23): note = RNA
  modified_base 8: mod_base = OTHER; note = 2-Prime-O-Methoxyethyl modified 5-methyl Uridine
  modified_base 9: mod_base = OTHER; note = DNA nucleotide carrying a 6-amino-5-nitro-3-yl-2(1H)-pyridone nucleobase
  modified_base order(6..7,12..14,16): mod_base = OTHER; note = 2-Prime-Fluoro modified nucleoside
  modified_base order(1..5,11,15,17..23): mod_base = OTHER; note = 2-Prime-O-Methyl modified nucleoside
  modified_base order(1^2,22^23): mod_base = OTHER; note = (1,3-dimethylimidazolidin-2-ylidene) Phosphoramidate linkage
  modified_base order(2..10,11..22): mod_base = OTHER; note = Phosphorothioate linkage
  modified_base 10^11: mod_base = OTHER; note = Methylphosphonate linkage
  misc_feature 1..23: note = RM114878
cttcgtctnatggacaaagtctt

SEQ ID NO: 234 - DNA, 23 bp, synthetic construct
  source 1..23: mol_type = other DNA
  misc_feature 6..7: note = DNA
  misc_feature order(1..5,8..23): note = RNA
  modified_base 5: mod_base = OTHER; note = 2-Prime-O-Methoxyethyl modified 5-methyl Uridine
  modified_base 6: mod_base = OTHER; note = DNA nucleotide carrying a 6-amino-5-nitro-3-yl-2(1H)-pyridone nucleobase
  modified_base order(3..4,9..11,13): mod_base = OTHER; note = 2-Prime-Fluoro modified nucleoside
  modified_base order(1..2,8,12,14..23): mod_base = OTHER; note = 2-Prime-O-Methyl modified nucleoside
  modified_base order(1^2,22^23): mod_base = OTHER; note = (1,3-dimethylimidazolidin-2-ylidene) Phosphoramidate linkage
  modified_base order(2..7,8..22): mod_base = OTHER; note = Phosphorothioate linkage
  modified_base 7^8: mod_base = OTHER; note = Methylphosphonate linkage
  misc_feature 1..23: note = RM114879
cgtctnatggacaaagtctttaa

SEQ ID NO: 235 - DNA, 32 bp, synthetic construct; identical to SEQ ID NO: 74
  source 1..32: mol_type = other DNA
  misc_feature 25..26: note = DNA
  misc_feature order(1..24,27..32): note = RNA
  modified_base 24: mod_base = OTHER; note = 2-Prime-O-Methoxyethyl modified 5-methyl Uridine
  modified_base 25: mod_base = OTHER; note = DNA nucleotide carrying a 6-amino-5-nitro-3-yl-2(1H)-pyridone nucleobase
  modified_base order(22..23,28..30,32): mod_base = OTHER; note = 2-Prime-Fluoro modified nucleoside
  modified_base order(1..21,27,31): mod_base = OTHER; note = 2-Prime-O-Methyl modified nucleoside
  modified_base order(1^2,31^32): mod_base = OTHER; note = (1,3-dimethylimidazolidin-2-ylidene) Phosphoramidate linkage
  modified_base order(2..26,27..31): mod_base = OTHER; note = Phosphorothioate linkage
  modified_base 26^27: mod_base = OTHER; note = Methylphosphonate linkage
  misc_feature 1..32: note = RM114880

SEQ ID NO: 236 - DNA, 32 bp, synthetic construct; identical to SEQ ID NO: 75
  source 1..32: mol_type = other DNA
  misc_feature 22..23: note = DNA
  misc_feature order(1..21,24..32): note = RNA
  modified_base 21: mod_base = OTHER; note = 2-Prime-O-Methoxyethyl modified 5-methyl Uridine
  modified_base 22: mod_base = OTHER; note = DNA nucleotide carrying a 6-amino-5-nitro-3-yl-2(1H)-pyridone nucleobase
  modified_base order(19..20,25..27,29): mod_base = OTHER; note = 2-Prime-Fluoro modified nucleoside
  modified_base order(1..18,24,28,30..32): mod_base = OTHER; note = 2-Prime-O-Methyl modified nucleoside
  modified_base order(1^2,31^32): mod_base = OTHER; note = (1,3-dimethylimidazolidin-2-ylidene) Phosphoramidate linkage
  modified_base order(2..23,24..31): mod_base = OTHER; note = Phosphorothioate linkage
  modified_base 23^24: mod_base = OTHER; note = Methylphosphonate linkage
  misc_feature 1..32: note = RM114881

SEQ ID NO: 237 - DNA, 32 bp, synthetic construct; identical to SEQ ID NO: 76
  source 1..32: mol_type = other DNA
  misc_feature 19..20: note = DNA
  misc_feature order(1..18,21..32): note = RNA
  modified_base 18: mod_base = OTHER; note = 2-Prime-O-Methoxyethyl modified 5-methyl Uridine
  modified_base 19: mod_base = OTHER; note = DNA nucleotide carrying a 6-amino-5-nitro-3-yl-2(1H)-pyridone nucleobase
  modified_base order(16..17,22..24,26): mod_base = OTHER; note = 2-Prime-Fluoro modified nucleoside
  modified_base order(1..15,21,25,27..32): mod_base = OTHER; note = 2-Prime-O-Methyl modified nucleoside
  modified_base order(1^2,31^32): mod_base = OTHER; note = (1,3-dimethylimidazolidin-2-ylidene) Phosphoramidate linkage
  modified_base order(2..20,21..31): mod_base = OTHER; note = Phosphorothioate linkage
  modified_base 20^21: mod_base = OTHER; note = Methylphosphonate linkage
  misc_feature 1..32: note = RM114882

SEQ ID NO: 238 - DNA, 32 bp, synthetic construct; identical to SEQ ID NO: 77
  source 1..32: mol_type = other DNA
  misc_feature 16..17: note = DNA
  misc_feature order(1..15,18..32): note = RNA
  modified_base 15: mod_base = OTHER; note = 2-Prime-O-Methoxyethyl modified 5-methyl Uridine
  modified_base 16: mod_base = OTHER; note = DNA nucleotide carrying a 6-amino-5-nitro-3-yl-2(1H)-pyridone nucleobase
  modified_base order(13..14,19..21,23): mod_base = OTHER; note = 2-Prime-Fluoro modified nucleoside
  modified_base order(1..12,18,22,24..32): mod_base = OTHER; note = 2-Prime-O-Methyl modified nucleoside
  modified_base order(1^2,31^32): mod_base = OTHER; note = (1,3-dimethylimidazolidin-2-ylidene) Phosphoramidate linkage
  modified_base order(2..17,18..31): mod_base = OTHER; note = Phosphorothioate linkage
  modified_base 17^18: mod_base = OTHER; note = Methylphosphonate linkage
  misc_feature 1..32: note = RM114883

SEQ ID NO: 239 - DNA, 32 bp, synthetic construct; identical to SEQ ID NO: 78
  source 1..32: mol_type = other DNA
  misc_feature 13..14: note = DNA
  misc_feature order(1..12,15..32): note = RNA
  modified_base 12: mod_base = OTHER; note = 2-Prime-O-Methoxyethyl modified 5-methyl Uridine
  modified_base 13: mod_base = OTHER; note = DNA nucleotide carrying a 6-amino-5-nitro-3-yl-2(1H)-pyridone nucleobase
  modified_base order(10..11,16..18,20): mod_base = OTHER; note = 2-Prime-Fluoro modified nucleoside
  modified_base order(1..9,15,19,21..32): mod_base = OTHER; note = 2-Prime-O-Methyl modified nucleoside
  modified_base order(1^2,31^32): mod_base = OTHER; note = (1,3-dimethylimidazolidin-2-ylidene) Phosphoramidate linkage
  modified_base order(2..14,15..31): mod_base = OTHER; note = Phosphorothioate linkage
  modified_base 14^15: mod_base = OTHER; note = Methylphosphonate linkage
  misc_feature 1..32: note = RM114884

SEQ ID NO: 240 - DNA, 32 bp, synthetic construct; identical to SEQ ID NO: 79
  source 1..32: mol_type = other DNA
  misc_feature 10..11: note = DNA
  misc_feature order(1..9,12..32): note = RNA
  modified_base 9: mod_base = OTHER; note = 2-Prime-O-Methoxyethyl modified 5-methyl Uridine
  modified_base 10: mod_base = OTHER; note = DNA nucleotide carrying a 6-amino-5-nitro-3-yl-2(1H)-pyridone nucleobase
  modified_base order(7..8,13..15,17): mod_base = OTHER; note = 2-Prime-Fluoro modified nucleoside
  modified_base order(1..6,12,16,18..32): mod_base = OTHER; note = 2-Prime-O-Methyl modified nucleoside
  modified_base order(1^2,31^32): mod_base = OTHER; note = (1,3-dimethylimidazolidin-2-ylidene) Phosphoramidate linkage
  modified_base order(2..11,12..31): mod_base = OTHER; note = Phosphorothioate linkage
  modified_base 11^12: mod_base = OTHER; note = Methylphosphonate linkage
  misc_feature 1..32: note = RM114885

SEQ ID NO: 241 - DNA, 32 bp, synthetic construct; identical to SEQ ID NO: 80
  source 1..32: mol_type = other DNA
  misc_feature 7..8: note = DNA
  misc_feature order(1..6,9..32): note = RNA
  modified_base 6: mod_base = OTHER; note = 2-Prime-O-Methoxyethyl modified 5-methyl Uridine
  modified_base 7: mod_base = OTHER; note = DNA nucleotide carrying a 6-amino-5-nitro-3-yl-2(1H)-pyridone nucleobase
  modified_base order(4..5,10..12,14): mod_base = OTHER; note = 2-Prime-Fluoro modified nucleoside
  modified_base order(1..3,9,13,15..32): mod_base = OTHER; note = 2-Prime-O-Methyl modified nucleoside
  modified_base order(1^2,31^32): mod_base = OTHER; note = (1,3-dimethylimidazolidin-2-ylidene) Phosphoramidate linkage
  modified_base order(2..8,9..31): mod_base = OTHER; note = Phosphorothioate linkage
  modified_base 8^9: mod_base = OTHER; note = Methylphosphonate linkage
  misc_feature 1..32: note = RM114886

SEQ ID NO: 242 - DNA, 32 bp, synthetic construct; identical to SEQ ID NO: 73
  source 1..32: mol_type = other DNA
  misc_feature 28..29: note = DNA
  misc_feature order(1..27,30..32): note = RNA
  modified_base 27: mod_base = OTHER; note = 2-Prime-O-Methoxyethyl modified 5-methyl Uridine
  modified_base 28: mod_base = OTHER; note = DNA nucleotide carrying a 6-amino-5-nitro-3-yl-2(1H)-pyridone nucleobase
  modified_base order(25..26,31): mod_base = OTHER; note = 2-Prime-Fluoro modified nucleoside
  modified_base order(1..24,30,32): mod_base = OTHER; note = 2-Prime-O-Methyl modified nucleoside
  modified_base order(1^2,31^32): mod_base = OTHER; note = (1,3-dimethylimidazolidin-2-ylidene) Phosphoramidate linkage
  modified_base order(2..29,30^31): mod_base = OTHER; note = Phosphorothioate linkage
  modified_base 29^30: mod_base = OTHER; note = Methylphosphonate linkage
  misc_feature 1..32: note = RM114887

SEQ ID NO: 243 - DNA, 32 bp, synthetic construct; identical to SEQ ID NO: 74
  source 1..32: mol_type = other DNA
  misc_feature 25..26: note = DNA
  misc_feature order(1..24,27..32): note = RNA
  modified_base 24: mod_base = OTHER; note = 2-Prime-O-Methoxyethyl modified 5-methyl Uridine
  modified_base 25: mod_base = OTHER; note = DNA nucleotide carrying a 6-amino-5-nitro-3-yl-2(1H)-pyridone nucleobase
  modified_base order(22..23,28): mod_base = OTHER; note = 2-Prime-Fluoro modified nucleoside
  modified_base order(1..21,27,29..32): mod_base = OTHER; note = 2-Prime-O-Methyl modified nucleoside
  modified_base order(1^2,31^32): mod_base = OTHER; note = (1,3-dimethylimidazolidin-2-ylidene) Phosphoramidate linkage
  modified_base order(2..26,27..31): mod_base = OTHER; note = Phosphorothioate linkage
  modified_base 26^27: mod_base = OTHER; note = Methylphosphonate linkage
  misc_feature 1..32: note = RM114888

SEQ ID NO: 244 - DNA, 32 bp, synthetic construct; identical to SEQ ID NO: 75
  source 1..32: mol_type = other DNA
  misc_feature 22..23: note = DNA
  misc_feature order(1..21,24..32): note = RNA
  modified_base 21: mod_base = OTHER; note = 2-Prime-O-Methoxyethyl modified 5-methyl Uridine
  modified_base 22: mod_base = OTHER; note = DNA nucleotide carrying a 6-amino-5-nitro-3-yl-2(1H)-pyridone nucleobase
  modified_base order(19..20,25): mod_base = OTHER; note = 2-Prime-Fluoro modified nucleoside
  modified_base order(1..18,24,26..32): mod_base = OTHER; note = 2-Prime-O-Methyl modified nucleoside
  modified_base order(1^2,31^32): mod_base = OTHER; note = (1,3-dimethylimidazolidin-2-ylidene) Phosphoramidate linkage
  modified_base order(2..23,24..31): mod_base = OTHER; note = Phosphorothioate linkage
  modified_base 23^24: mod_base = OTHER; note = Methylphosphonate linkage
  misc_feature 1..32: note = RM114889

SEQ ID NO: 245 - DNA, 32 bp, synthetic construct; identical to SEQ ID NO: 76
  source 1..32: mol_type = other DNA
  misc_feature 19..20: note = DNA
  misc_feature order(1..18,21..32): note = RNA
  modified_base 18: mod_base = OTHER; note = 2-Prime-O-Methoxyethyl modified 5-methyl Uridine
  modified_base 19: mod_base = OTHER; note = DNA nucleotide carrying a 6-amino-5-nitro-3-yl-2(1H)-pyridone nucleobase
  modified_base order(16..17,22): mod_base = OTHER; note = 2-Prime-Fluoro modified nucleoside
  modified_base order(1..15,21,23..32): mod_base = OTHER; note = 2-Prime-O-Methyl modified nucleoside
  modified_base order(1^2,31^32): mod_base = OTHER; note = (1,3-dimethylimidazolidin-2-ylidene) Phosphoramidate linkage
  modified_base order(2..20,21..31): mod_base = OTHER; note = Phosphorothioate linkage
  modified_base 20^21: mod_base = OTHER; note = Methylphosphonate linkage
  misc_feature 1..32: note = RM114890

SEQ ID NO: 246 - DNA, 32 bp, synthetic construct; identical to SEQ ID NO: 77
  source 1..32: mol_type = other DNA
  misc_feature 16..17: note = DNA
  misc_feature order(1..15,18..32): note = RNA
  modified_base 15: mod_base = OTHER; note = 2-Prime-O-Methoxyethyl modified 5-methyl Uridine
  modified_base 16: mod_base = OTHER; note = DNA nucleotide carrying a 6-amino-5-nitro-3-yl-2(1H)-pyridone nucleobase
  modified_base order(13..14,19): mod_base = OTHER; note = 2-Prime-Fluoro modified nucleoside
  modified_base order(1..12,18,20..32): mod_base = OTHER; note = 2-Prime-O-Methyl modified nucleoside
  modified_base order(1^2,31^32): mod_base = OTHER; note = (1,3-dimethylimidazolidin-2-ylidene) Phosphoramidate linkage
  modified_base order(2..17,18..31): mod_base = OTHER; note = Phosphorothioate linkage
  modified_base 17^18: mod_base = OTHER; note = Methylphosphonate linkage
  misc_feature 1..32: note = RM114891

SEQ ID NO: 247 - DNA, 32 bp, synthetic construct; identical to SEQ ID NO: 78
  source 1..32: mol_type = other DNA
  misc_feature 13..14: note = DNA
  misc_feature order(1..12,15..32): note = RNA
  modified_base 12: mod_base = OTHER; note = 2-Prime-O-Methoxyethyl modified 5-methyl Uridine
  modified_base 13: mod_base = OTHER; note = DNA nucleotide carrying a 6-amino-5-nitro-3-yl-2(1H)-pyridone nucleobase
  modified_base order(10..11,16): mod_base = OTHER; note = 2-Prime-Fluoro modified nucleoside
  modified_base order(1..9,15,17..32): mod_base = OTHER; note = 2-Prime-O-Methyl modified nucleoside
  modified_base order(1^2,31^32): mod_base = OTHER; note = (1,3-dimethylimidazolidin-2-ylidene) Phosphoramidate linkage
  modified_base order(2..14,15..31): mod_base = OTHER; note = Phosphorothioate linkage
  modified_base 14^15: mod_base = OTHER; note = Methylphosphonate linkage
  misc_feature 1..32: note = RM114892

SEQ ID NO: 248 - DNA, 32 bp, synthetic construct; identical to SEQ ID NO: 79
  source 1..32: mol_type = other DNA
  misc_feature 10..11: note = DNA
  misc_feature order(1..9,12..32): note = RNA
  modified_base 9: mod_base = OTHER; note = 2-Prime-O-Methoxyethyl modified 5-methyl Uridine
  modified_base 10: mod_base = OTHER; note = DNA nucleotide carrying a 6-amino-5-nitro-3-yl-2(1H)-pyridone nucleobase
  modified_base order(7..8,13): mod_base = OTHER; note = 2-Prime-Fluoro modified nucleoside
  modified_base order(1..6,12,14..32): mod_base = OTHER; note = 2-Prime-O-Methyl modified nucleoside
  modified_base order(1^2,31^32): mod_base = OTHER; note = (1,3-dimethylimidazolidin-2-ylidene) Phosphoramidate linkage
  modified_base order(2..11,12..31): mod_base = OTHER; note = Phosphorothioate linkage
  modified_base 11^12: mod_base = OTHER; note = Methylphosphonate linkage
  misc_feature 1..32: note = RM114893

SEQ ID NO: 249 - DNA, 32 bp, synthetic construct; identical to SEQ ID NO: 80
  source 1..32: mol_type = other DNA
  misc_feature 7..8: note = DNA
  misc_feature order(1..6,9..32): note = RNA
  modified_base 6: mod_base = OTHER; note = 2-Prime-O-Methoxyethyl modified 5-methyl Uridine
  modified_base 7: mod_base = OTHER; note = DNA nucleotide carrying a 6-amino-5-nitro-3-yl-2(1H)-pyridone nucleobase
  modified_base order(4..5,10): mod_base = OTHER; note = 2-Prime-Fluoro modified nucleoside
  modified_base order(1..3,9,11..32): mod_base = OTHER; note = 2-Prime-O-Methyl modified nucleoside
  modified_base order(1^2,31^32): mod_base = OTHER; note = (1,3-dimethylimidazolidin-2-ylidene) Phosphoramidate linkage
  modified_base order(2..8,9..31): mod_base = OTHER; note = Phosphorothioate linkage
  modified_base 8^9: mod_base = OTHER; note = Methylphosphonate linkage
  misc_feature 1..32: note = RM114894

SEQ ID NO: 250 - DNA, 32 bp, synthetic construct; identical to SEQ ID NO: 78
  source 1..32: mol_type = other DNA
  misc_feature 13..14: note = DNA
  misc_feature order(1..12,15..32): note = RNA
  modified_base 12: mod_base = OTHER; note = 2-Prime-O-Methoxyethyl modified 5-methyl Uridine
  modified_base 13: mod_base = OTHER; note = DNA nucleotide carrying a 6-amino-5-nitro-3-yl-2(1H)-pyridone nucleobase
  modified_base order(7..9,16,29,32): mod_base = OTHER; note = 2-Prime-Fluoro modified nucleoside
  modified_base order(1..6,10..11,15,17..28,30..31): mod_base = OTHER; note = 2-Prime-O-Methyl modified nucleoside
  modified_base order(1^2,31^32): mod_base = OTHER; note = (1,3-dimethylimidazolidin-2-ylidene) Phosphoramidate linkage
  modified_base order(2..14,15..31): mod_base = OTHER; note = Phosphorothioate linkage
  modified_base 14^15: mod_base = OTHER; note = Methylphosphonate linkage
  misc_feature 1..32: note = RM114895

SEQ ID NO: 251 - DNA, 32 bp, synthetic construct; identical to SEQ ID NO: 79
  source 1..32: mol_type = other DNA
  misc_feature 10..11: note = DNA
  misc_feature order(1..9,12..32): note = RNA
  modified_base 9: mod_base = OTHER; note = 2-Prime-O-Methoxyethyl modified 5-methyl Uridine
  modified_base 10: mod_base = OTHER; note = DNA nucleotide carrying a 6-amino-5-nitro-3-yl-2(1H)-pyridone nucleobase
  modified_base order(4..6,13,26,29): mod_base = OTHER; note = 2-Prime-Fluoro modified nucleoside
  modified_base order(1..3,7..8,12,14..25,27..28,30..32): mod_base = OTHER; note = 2-Prime-O-Methyl modified nucleoside
  modified_base order(1^2,31^32): mod_base = OTHER; note = (1,3-dimethylimidazolidin-2-ylidene) Phosphoramidate linkage
  modified_base order(2..11,12..31): mod_base = OTHER; note = Phosphorothioate linkage
  modified_base 11^12: mod_base = OTHER; note = Methylphosphonate linkage
  misc_feature 1..32: note = RM114896

SEQ ID NO: 252 - DNA, 32 bp, synthetic construct; identical to SEQ ID NO: 80
  source 1..32: mol_type = other DNA
  misc_feature 7..8: note = DNA
  misc_feature order(1..6,9..32): note = RNA
  modified_base 6: mod_base = OTHER; note = 2-Prime-O-Methoxyethyl modified 5-methyl Uridine
  modified_base 7: mod_base = OTHER; note = DNA nucleotide carrying a 6-amino-5-nitro-3-yl-2(1H)-pyridone nucleobase
  modified_base order(1..3,10,23,26): mod_base = OTHER; note = 2-Prime-Fluoro modified nucleoside
  modified_base order(4..5,9,11..22,24..25,27..32): mod_base = OTHER; note = 2-Prime-O-Methyl modified nucleoside
  modified_base order(1^2,31^32): mod_base = OTHER; note = (1,3-dimethylimidazolidin-2-ylidene) Phosphoramidate linkage
  modified_base order(2..8,9..31): mod_base = OTHER; note = Phosphorothioate linkage
  modified_base 8^9: mod_base = OTHER; note = Methylphosphonate linkage
  misc_feature 1..32: note = RM114897

SEQ ID NO: 253 - DNA, 32 bp, synthetic construct; identical to SEQ ID NO: 75
  source 1..32: mol_type = other DNA
  misc_feature 22..23: note = DNA
  misc_feature order(1..21,24..32): note = RNA
  modified_base 21: mod_base = OTHER; note = 2-Prime-O-Methoxyethyl modified 5-methyl Uridine
  modified_base 22: mod_base = OTHER; note = DNA nucleotide carrying a 6-amino-5-nitro-3-yl-2(1H)-pyridone nucleobase
  modified_base order(5,8,25,28..30): mod_base = OTHER; note = 2-Prime-Fluoro modified nucleoside
  modified_base order(1..4,6..7,9..20,24,26..27,31..32): mod_base = OTHER; note = 2-Prime-O-Methyl modified nucleoside
  modified_base order(1^2,31^32): mod_base = OTHER; note = (1,3-dimethylimidazolidin-2-ylidene) Phosphoramidate linkage
  modified_base order(2..23,24..31): mod_base = OTHER; note = Phosphorothioate linkage
  modified_base 23^24: mod_base = OTHER; note = Methylphosphonate linkage
  misc_feature 1..32: note = RM114898

SEQ ID NO: 254 - DNA, 32 bp, synthetic construct; identical to SEQ ID NO: 76
  source 1..32: mol_type = other DNA
  misc_feature 19..20: note = DNA
  misc_feature order(1..18,21..32): note = RNA
  modified_base 18: mod_base = OTHER; note = 2-Prime-O-Methoxyethyl modified 5-methyl Uridine
  modified_base 19: mod_base = OTHER; note = DNA nucleotide carrying a 6-amino-5-nitro-3-yl-2(1H)-pyridone nucleobase
  modified_base order(2,5,22,25..27): mod_base = OTHER; note = 2-Prime-Fluoro modified nucleoside
  modified_base order(1,3..4,6..17,21,23..24,28..32): mod_base = OTHER; note = 2-Prime-O-Methyl modified nucleoside
  modified_base order(1^2,31^32): mod_base = OTHER; note = (1,3-dimethylimidazolidin-2-ylidene) Phosphoramidate linkage
  modified_base order(2..20,21..31): mod_base = OTHER; note = Phosphorothioate linkage
  modified_base 20^21: mod_base = OTHER; note = Methylphosphonate linkage
  misc_feature 1..32: note = RM114899

SEQ ID NO: 255 - DNA, 23 bp, synthetic construct
  source 1..23: mol_type = other DNA
  misc_feature 18..19: note = DNA
  misc_feature order(1..17,20..23): note = RNA
  modified_base 17: mod_base = OTHER; note = 2-Prime-O-Methoxyethyl modified 5-methyl Uridine
  modified_base 18: mod_base = OTHER; note = DNA nucleotide carrying a 6-amino-5-nitro-3-yl-2(1H)-pyridone nucleobase
  modified_base order(12..14,21): mod_base = OTHER; note = 2-Prime-Fluoro modified nucleoside
  modified_base order(1..11,15..16,20,22..23): mod_base = OTHER; note = 2-Prime-O-Methyl modified nucleoside
  modified_base order(1^2,22^23): mod_base = OTHER; note = (1,3-dimethylimidazolidin-2-ylidene) Phosphoramidate linkage
  modified_base order(2..19,20..22): mod_base = OTHER; note = Phosphorothioate linkage
  modified_base 19^20: mod_base = OTHER; note = Methylphosphonate linkage
  misc_feature 1..23: note = RM114900
aatttggcccttcgtctnatgga

SEQ ID NO: 256 - DNA, 23 bp, synthetic construct
  source 1..23: mol_type = other DNA
  misc_feature 15..16: note = DNA
  misc_feature order(1..14,17..23): note = RNA
  modified_base 14: mod_base = OTHER; note = 2-Prime-O-Methoxyethyl modified 5-methyl Uridine
  modified_base 15: mod_base = OTHER; note = DNA nucleotide carrying a 6-amino-5-nitro-3-yl-2(1H)-pyridone nucleobase
  modified_base order(9..11,18): mod_base = OTHER; note = 2-Prime-Fluoro modified nucleoside
  modified_base order(1..8,12..13,17,19..23): mod_base = OTHER; note = 2-Prime-O-Methyl modified nucleoside
  modified_base order(1^2,22^23): mod_base = OTHER; note = (1,3-dimethylimidazolidin-2-ylidene) Phosphoramidate linkage
  modified_base order(2..16,17..22): mod_base = OTHER; note = Phosphorothioate linkage
  modified_base 16^17: mod_base = OTHER; note = Methylphosphonate linkage
  misc_feature 1..23: note = RM114901
ttggcccttcgtctnatggacaa

SEQ ID NO: 257 - DNA, 23 bp, synthetic construct
  source 1..23: mol_type = other DNA
  misc_feature 12..13: note = DNA
  misc_feature order(1..11,14..23): note = RNA
  modified_base 11: mod_base = OTHER; note = 2-Prime-O-Methoxyethyl modified 5-methyl Uridine
  modified_base 12: mod_base = OTHER; note = DNA nucleotide carrying a 6-amino-5-nitro-3-yl-2(1H)-pyridone nucleobase
  modified_base order(6..8,15): mod_base = OTHER; note = 2-Prime-Fluoro modified nucleoside
  modified_base order(1..5,9..10,14,16..23): mod_base = OTHER; note = 2-Prime-O-Methyl modified nucleoside
  modified_base order(1^2,22^23): mod_base = OTHER; note = (1,3-dimethylimidazolidin-2-ylidene) Phosphoramidate linkage
  modified_base order(2..13,14..22): mod_base = OTHER; note = Phosphorothioate linkage
  modified_base 13^14: mod_base = OTHER; note = Methylphosphonate linkage
  misc_feature 1..23: note = RM114902
gcccttcgtctnatggacaaagt

SEQ ID NO: 258 - DNA, 23 bp, synthetic construct
  source 1..23: mol_type = other DNA
  misc_feature 9..10: note = DNA
  misc_feature order(1..8,11..23): note = RNA
  modified_base 8: mod_base = OTHER; note = 2-Prime-O-Methoxyethyl modified 5-methyl Uridine
  modified_base 9: mod_base = OTHER; note = DNA nucleotide carrying a 6-amino-5-nitro-3-yl-2(1H)-pyridone nucleobase
  modified_base order(3..5,12): mod_base = OTHER; note = 2-Prime-Fluoro modified nucleoside
  modified_base order(1..2,6..7,11,13..23): mod_base = OTHER; note = 2-Prime-O-Methyl modified nucleoside
  modified_base order(1^2,22^23): mod_base = OTHER; note = (1,3-dimethylimidazolidin-2-ylidene) Phosphoramidate linkage
  modified_base order(2..10,11..22): mod_base = OTHER; note = Phosphorothioate linkage
  modified_base 10^11: mod_base = OTHER; note = Methylphosphonate linkage
  misc_feature 1..23: note = RM114903
cttcgtctnatggacaaagtctt

SEQ ID NO: 259 - DNA, 23 bp, synthetic construct
  source 1..23: mol_type = other DNA
  misc_feature 18..19: note = DNA
  misc_feature order(1..17,20..23): note = RNA
  modified_base 17: mod_base = OTHER; note = 2-Prime-O-Methoxyethyl modified 5-methyl Uridine
  modified_base 18: mod_base = OTHER; note = DNA nucleotide carrying a 6-amino-5-nitro-3-yl-2(1H)-pyridone nucleobase
  modified_base order(14,21): mod_base = OTHER; note = 2-Prime-Fluoro modified nucleoside
  modified_base order(1..13,15..16,20,22..23): mod_base = OTHER; note = 2-Prime-O-Methyl modified nucleoside
  modified_base order(1^2,22^23): mod_base = OTHER; note = (1,3-dimethylimidazolidin-2-ylidene) Phosphoramidate linkage
  modified_base order(2..19,20..22): mod_base = OTHER; note = Phosphorothioate linkage
  modified_base 19^20: mod_base = OTHER; note = Methylphosphonate linkage
  misc_feature 1..23: note = RM114904
aatttggcccttcgtctnatgga

SEQ ID NO: 260 - DNA, 23 bp, synthetic construct
  source 1..23: mol_type = other DNA
  misc_feature 15..16: note = DNA
  misc_feature order(1..14,17..23): note = RNA
  modified_base 14: mod_base = OTHER; note = 2-Prime-O-Methoxyethyl modified 5-methyl Uridine
  modified_base 15: mod_base = OTHER; note = DNA nucleotide carrying a 6-amino-5-nitro-3-yl-2(1H)-pyridone nucleobase
  modified_base order(11,18): mod_base = OTHER; note = 2-Prime-Fluoro modified nucleoside
  modified_base order(1..10,12..13,17,19..23): mod_base = OTHER; note = 2-Prime-O-Methyl modified nucleoside
  modified_base order(1^2,22^23): mod_base = OTHER; note = (1,3-dimethylimidazolidin-2-ylidene) Phosphoramidate linkage
  modified_base order(2..16,17..22): mod_base = OTHER; note = Phosphorothioate linkage
  modified_base 16^17: mod_base = OTHER; note = Methylphosphonate linkage
  misc_feature 1..23: note = RM114905
ttggcccttcgtctnatggacaa

SEQ ID NO: 261 - DNA, 23 bp, synthetic construct
  source 1..23: mol_type = other DNA
  misc_feature 12..13: note = DNA
  misc_feature order(1..11,14..23): note = RNA
  modified_base 11: mod_base = OTHER; note = 2-Prime-O-Methoxyethyl modified 5-methyl Uridine
  modified_base 12: mod_base = OTHER; note = DNA nucleotide carrying a 6-amino-5-nitro-3-yl-2(1H)-pyridone nucleobase
  modified_base order(8,15): mod_base = OTHER; note = 2-Prime-Fluoro modified nucleoside
  modified_base order(1..7,9..10,14,16..23): mod_base = OTHER; note = 2-Prime-O-Methyl modified nucleoside
  modified_base order(1^2,22^23): mod_base = OTHER; note = (1,3-dimethylimidazolidin-2-ylidene) Phosphoramidate linkage
  modified_base order(2..13,14..22): mod_base = OTHER; note = Phosphorothioate linkage
  modified_base 13^14: mod_base = OTHER; note = Methylphosphonate linkage
  misc_feature 1..23: note = RM114906
gcccttcgtctnatggacaaagt

SEQ ID NO: 262 - DNA, 23 bp, synthetic construct
  source 1..23: mol_type = other DNA
  misc_feature 9..10: note = DNA
  misc_feature order(1..8,11..23): note = RNA
  modified_base 8: mod_base = OTHER; note = 2-Prime-O-Methoxyethyl modified 5-methyl Uridine
  modified_base 9: mod_base = OTHER; note = DNA nucleotide carrying a 6-amino-5-nitro-3-yl-2(1H)-pyridone nucleobase
  modified_base order(5,12): mod_base = OTHER; note = 2-Prime-Fluoro modified nucleoside
  modified_base order(1..4,6..7,11,13..23): mod_base = OTHER; note = 2-Prime-O-Methyl modified nucleoside
  modified_base order(1^2,22^23): mod_base = OTHER; note = (1,3-dimethylimidazolidin-2-ylidene) Phosphoramidate linkage
  modified_base order(2..10,11..22): mod_base = OTHER; note = Phosphorothioate linkage
  modified_base 10^11: mod_base = OTHER; note = Methylphosphonate linkage
  misc_feature 1..23: note = RM114907
cttcgtctnatggacaaagtctt

SEQ ID NO: 263 - DNA, 23 bp, synthetic construct
  source 1..23: mol_type = other DNA
  misc_feature 6..7: note = DNA
  misc_feature order(1..5,8..23): note = RNA
  modified_base 5: mod_base = OTHER; note = 2-Prime-O-Methoxyethyl modified 5-methyl Uridine
  modified_base 6: mod_base = OTHER; note = DNA nucleotide carrying a 6-amino-5-nitro-3-yl-2(1H)-pyridone nucleobase
  modified_base order(2,9): mod_base = OTHER; note = 2-Prime-Fluoro modified nucleoside
  modified_base order(1,3..4,8,10..23): mod_base = OTHER; note = 2-Prime-O-Methyl modified nucleoside
  modified_base order(1^2,22^23): mod_base = OTHER; note = (1,3-dimethylimidazolidin-2-ylidene) Phosphoramidate linkage
  modified_base order(2..7,8..22): mod_base = OTHER; note = Phosphorothioate linkage
  modified_base 7^8: mod_base = OTHER; note = Methylphosphonate linkage
  misc_feature 1..23: note = RM114908
cgtctnatggacaaagtctttaa

SEQ ID NO: 264 - DNA, 26 bp, synthetic construct
  source 1..26: mol_type = other DNA
  misc_feature 22..23: note = DNA
  misc_feature order(1..21,24..26): note = RNA
  modified_base 21: mod_base = OTHER; note = 2-Prime-O-Methoxyethyl modified 5-methyl Uridine
  modified_base 22: mod_base = OTHER; note = DNA nucleotide carrying a 6-amino-5-nitro-3-yl-2(1H)-pyridone nucleobase
  modified_base order(18,25): mod_base = OTHER; note = 2-Prime-Fluoro modified nucleoside
  modified_base order(1..17,19..20,24,26): mod_base = OTHER; note = 2-Prime-O-Methyl modified nucleoside
  modified_base order(1^2,25^26): mod_base = OTHER; note = (1,3-dimethylimidazolidin-2-ylidene) Phosphoramidate linkage
  modified_base order(2..23,24^25): mod_base = OTHER; note = Phosphorothioate linkage
  modified_base 23^24: mod_base = OTHER; note = Methylphosphonate linkage
  misc_feature 1..26: note = RM114909
cattaatttggcccttcgtctnatgg

SEQ ID NO: 265 - DNA, 26 bp, synthetic construct
  source 1..26: mol_type = other DNA
  misc_feature 19..20: note = DNA
  misc_feature order(1..18,21..26): note = RNA
  modified_base 18: mod_base = OTHER; note = 2-Prime-O-Methoxyethyl modified 5-methyl Uridine
  modified_base 19: mod_base = OTHER; note = DNA nucleotide carrying a 6-amino-5-nitro-3-yl-2(1H)-pyridone nucleobase
  modified_base order(15,22): mod_base = OTHER; note = 2-Prime-Fluoro modified nucleoside
  modified_base order(1..14,16..17,21,23..26): mod_base = OTHER; note = 2-Prime-O-Methyl modified nucleoside
  modified_base order(1^2,25^26): mod_base = OTHER; note = (1,3-dimethylimidazolidin-2-ylidene) Phosphoramidate linkage
  modified_base order(2..20,21..25): mod_base = OTHER; note = Phosphorothioate linkage
  modified_base 20^21: mod_base = OTHER; note = Methylphosphonate linkage
  misc_feature 1..26: note = RM114910
taatttggcccttcgtctnatggaca

SEQ ID NO: 266 - DNA, 26 bp, synthetic construct
  source 1..26: mol_type = other DNA
  misc_feature 16..17: note = DNA
  misc_feature order(1..15,18..26): note = RNA
  modified_base 15: mod_base = OTHER; note = 2-Prime-O-Methoxyethyl modified 5-methyl Uridine
  modified_base 16: mod_base = OTHER; note = DNA nucleotide carrying a 6-amino-5-nitro-3-yl-2(1H)-pyridone nucleobase
  modified_base order(12,19): mod_base = OTHER; note = 2-Prime-Fluoro modified nucleoside
  modified_base order(1..11,13..14,18,20..26): mod_base = OTHER; note = 2-Prime-O-Methyl modified nucleoside
  modified_base order(1^2,25^26): mod_base = OTHER; note = (1,3-dimethylimidazolidin-2-ylidene) Phosphoramidate linkage
  modified_base order(2..17,18..25): mod_base = OTHER; note = Phosphorothioate linkage
  modified_base 17^18: mod_base = OTHER; note = Methylphosphonate linkage
  misc_feature 1..26: note = RM114911
tttggcccttcgtctnatggacaaag

SEQ ID NO: 267 - DNA, 26 bp, synthetic construct
  source 1..26: mol_type = other DNA
  misc_feature 13..14: note = DNA
  misc_feature order(1..12,15..26): note = RNA
  modified_base 12: mod_base = OTHER; note = 2-Prime-O-Methoxyethyl modified 5-methyl Uridine
  modified_base 13: mod_base = OTHER; note = DNA nucleotide carrying a 6-amino-5-nitro-3-yl-2(1H)-pyridone nucleobase
  modified_base order(9,16): mod_base = OTHER; note = 2-Prime-Fluoro modified nucleoside
  modified_base order(1..8,10..11,15,17..26): mod_base = OTHER; note = 2-Prime-O-Methyl modified nucleoside
  modified_base order(1^2,25^26): mod_base = OTHER; note = (1,3-dimethylimidazolidin-2-ylidene) Phosphoramidate linkage
  modified_base order(2..14,15..25): mod_base = OTHER; note = Phosphorothioate linkage
  modified_base 14^15: mod_base = OTHER; note = Methylphosphonate linkage
  misc_feature 1..26: note = RM114912
ggcccttcgtctnatggacaaagtct

SEQ ID NO: 268 - DNA, 26 bp, synthetic construct
  source 1..26: mol_type = other DNA
  misc_feature 10..11: note = DNA
  misc_feature order(1..9,12..26): note = RNA
  modified_base 9: mod_base = OTHER; note = 2-Prime-O-Methoxyethyl modified 5-methyl Uridine
  modified_base 10: mod_base = OTHER; note = DNA nucleotide carrying a 6-amino-5-nitro-3-yl-2(1H)-pyridone nucleobase
  modified_base order(6,13): mod_base = OTHER; note = 2-Prime-Fluoro modified nucleoside
  modified_base order(1..5,7..8,12,14..26): mod_base = OTHER; note = 2-Prime-O-Methyl modified nucleoside
  modified_base order(1^2,25^26): mod_base = OTHER; note = (1,3-dimethylimidazolidin-2-ylidene) Phosphoramidate linkage
  modified_base order(2..11,12..25): mod_base = OTHER; note = Phosphorothioate linkage
  modified_base 11^12: mod_base = OTHER; note = Methylphosphonate linkage
  misc_feature 1..26: note = RM114913
ccttcgtctnatggacaaagtcttta

SEQ ID NO: 269 - DNA, 26 bp, synthetic construct
  source 1..26: mol_type = other DNA
  misc_feature 7..8: note = DNA
  misc_feature order(1..6,9..26): note = RNA
  modified_base 6: mod_base = OTHER; note = 2-Prime-O-Methoxyethyl modified 5-methyl Uridine
  modified_base 7: mod_base = OTHER; note = DNA nucleotide carrying a 6-amino-5-nitro-3-yl-2(1H)-pyridone nucleobase
  modified_base order(3,10): mod_base = OTHER; note = 2-Prime-Fluoro modified nucleoside
  modified_base order(1..2,4..5,9,11..26): mod_base = OTHER; note = 2-Prime-O-Methyl modified nucleoside
  modified_base order(1^2,25^26): mod_base = OTHER; note = (1,3-dimethylimidazolidin-2-ylidene) Phosphoramidate linkage
  modified_base order(2..8,9..25): mod_base = OTHER; note = Phosphorothioate linkage
  modified_base 8^9: mod_base = OTHER; note = Methylphosphonate linkage
  misc_feature 1..26: note = RM114914
tcgtctnatggacaaagtctttaaga

SEQ ID NO: 270 - DNA, 29 bp, synthetic construct
  source 1..29: mol_type = other DNA
  misc_feature 24..25: note = DNA
  misc_feature order(1..23,26..29): note = RNA
  modified_base 23: mod_base = OTHER; note = 2-Prime-O-Methoxyethyl modified 5-methyl Uridine
  modified_base 24: mod_base = OTHER; note = DNA nucleotide carrying a 6-amino-5-nitro-3-yl-2(1H)-pyridone nucleobase
  modified_base order(20,27): mod_base = OTHER; note = 2-Prime-Fluoro modified nucleoside
  modified_base order(1..19,21..22,26,28..29): mod_base = OTHER; note = 2-Prime-O-Methyl modified nucleoside
  modified_base order(1^2,28^29): mod_base = OTHER; note = (1,3-dimethylimidazolidin-2-ylidene) Phosphoramidate linkage
  modified_base order(2..25,26..28): mod_base = OTHER; note = Phosphorothioate linkage
  modified_base 25^26: mod_base = OTHER; note = Methylphosphonate linkage
  misc_feature 1..29: note = RM114915
gtcattaatttggcccttcgtctnatgga

SEQ ID NO: 271 - DNA, 29 bp, synthetic construct
  source 1..29: mol_type = other DNA
  misc_feature 21..22: note = DNA
  misc_feature order(1..20,23..29): note = RNA
  modified_base 20: mod_base = OTHER; note = 2-Prime-O-Methoxyethyl modified 5-methyl Uridine
  modified_base 21: mod_base = OTHER; note = DNA nucleotide carrying a 6-amino-5-nitro-3-yl-2(1H)-pyridone nucleobase
  modified_base order(17,24): mod_base = OTHER; note = 2-Prime-Fluoro modified nucleoside
  modified_base order(1..16,18..19,23,25..29): mod_base = OTHER; note = 2-Prime-O-Methyl modified nucleoside
  modified_base order(1^2,28^29): mod_base = OTHER; note = (1,3-dimethylimidazolidin-2-ylidene) Phosphoramidate linkage
  modified_base order(2..22,23..28): mod_base = OTHER; note = Phosphorothioate linkage
  modified_base 22^23: mod_base = OTHER; note = Methylphosphonate linkage
  misc_feature 1..29: note = RM114916
attaatttggcccttcgtctnatggacaa

SEQ ID NO: 272 - DNA, 29 bp, synthetic construct
  source 1..29: mol_type = other DNA
  misc_feature 18..19: note = DNA
  misc_feature order(1..17,20..29): note = RNA
  modified_base 17: mod_base = OTHER; note = 2-Prime-O-Methoxyethyl modified 5-methyl Uridine
  modified_base 18: mod_base = OTHER; note = DNA nucleotide carrying a 6-amino-5-nitro-3-yl-2(1H)-pyridone nucleobase
  modified_base order(14,21): mod_base = OTHER; note = 2-Prime-Fluoro modified nucleoside
  modified_base order(1..13,15..16,20,22..29): mod_base = OTHER; note = 2-Prime-O-Methyl modified nucleoside
  modified_base order(1^2,28^29): mod_base = OTHER; note = (1,3-dimethylimidazolidin-2-ylidene) Phosphoramidate linkage
  modified_base order(2..19,20..28): mod_base = OTHER; note = Phosphorothioate linkage
  modified_base 19^20: mod_base = OTHER; note = Methylphosphonate linkage
  misc_feature 1..29: note = RM114917
aatttggcccttcgtctnatggacaaagt

SEQ ID NO: 273 - DNA, 29 bp, synthetic construct
  source 1..29: mol_type = other DNA
  misc_feature 15..16: note = DNA
  misc_feature order(1..14,17..29): note = RNA
  modified_base 14: mod_base = OTHER; note = 2-Prime-O-Methoxyethyl modified 5-methyl Uridine
  modified_base 15: mod_base = OTHER; note = DNA nucleotide carrying a 6-amino-5-nitro-3-yl-2(1H)-pyridone nucleobase
  modified_base order(11,18): mod_base = OTHER; note = 2-Prime-Fluoro modified nucleoside
  modified_base order(1..10,12..13,17,19..29): mod_base = OTHER; note = 2-Prime-O-Methyl modified nucleoside
  modified_base order(1^2,28^29): mod_base = OTHER; note = (1,3-dimethylimidazolidin-2-ylidene) Phosphoramidate linkage
  modified_base order(2..16,17..28): mod_base = OTHER; note = Phosphorothioate linkage
  modified_base 16^17: mod_base = OTHER; note = Methylphosphonate linkage
  misc_feature 1..29: note = RM114918
ttggcccttcgtctnatggacaaagtctt

SEQ ID NO: 274 - DNA, 29 bp, synthetic construct
  source 1..29: mol_type = other DNA
  misc_feature 12..13: note = DNA
  misc_feature order(1..11,14..29): note = RNA
  modified_base 11: mod_base = OTHER; note = 2-Prime-O-Methoxyethyl modified 5-methyl Uridine
  modified_base 12: mod_base = OTHER; note = DNA nucleotide carrying a 6-amino-5-nitro-3-yl-2(1H)-pyridone nucleobase
  modified_base order(8,15): mod_base = OTHER; note = 2-Prime-Fluoro modified nucleoside
  modified_base order(1..7,9..10,14,16..29): mod_base = OTHER; note = 2-Prime-O-Methyl modified nucleoside
  modified_base order(1^2,28^29): mod_base = OTHER; note = (1,3-dimethylimidazolidin-2-ylidene) Phosphoramidate linkage
  modified_base order(2..13,14..28): mod_base = OTHER; note = Phosphorothioate linkage
  modified_base 13^14: mod_base = OTHER; note = Methylphosphonate linkage
  misc_feature 1..29: note = RM114919
gcccttcgtctnatggacaaagtctttaa

SEQ ID NO: 275 - DNA, 29 bp, synthetic construct
  source 1..29: mol_type = other DNA
  misc_feature 9..10: note = DNA
  misc_feature order(1..8,11..29): note = RNA
  modified_base 8: mod_base = OTHER; note = 2-Prime-O-Methoxyethyl modified 5-methyl Uridine
  modified_base 9: mod_base = OTHER; note = DNA nucleotide carrying a 6-amino-5-nitro-3-yl-2(1H)-pyridone nucleobase
  modified_base order(5,12): mod_base = OTHER; note = 2-Prime-Fluoro modified nucleoside
  modified_base order(1..4,6..7,11,13..29): mod_base = OTHER; note = 2-Prime-O-Methyl modified nucleoside
  modified_base order(1^2,28^29): mod_base = OTHER; note = (1,3-dimethylimidazolidin-2-ylidene) Phosphoramidate linkage
  modified_base order(2..10,11..28): mod_base = OTHER; note = Phosphorothioate linkage
  modified_base 10^11: mod_base = OTHER; note = Methylphosphonate linkage
  misc_feature 1..29: note = RM114920
cttcgtctnatggacaaagtctttaagac

SEQ ID NO: 276 - DNA, 29 bp, synthetic construct
  source 1..29: mol_type = other DNA
  misc_feature 6..7: note = DNA
  misc_feature order(1..5,8..29): note = RNA
  modified_base 5: mod_base = OTHER; note = 2-Prime-O-Methoxyethyl modified 5-methyl Uridine
  modified_base 6: mod_base = OTHER; note = DNA nucleotide carrying a 6-amino-5-nitro-3-yl-2(1H)-pyridone nucleobase
  modified_base order(2,9): mod_base = OTHER; note = 2-Prime-Fluoro modified nucleoside
  modified_base order(1,3..4,8,10..29): mod_base = OTHER; note = 2-Prime-O-Methyl modified nucleoside
  modified_base order(1^2,28^29): mod_base = OTHER; note = (1,3-dimethylimidazolidin-2-ylidene) Phosphoramidate linkage
  modified_base order(2..7,8..28): mod_base = OTHER; note = Phosphorothioate linkage
  modified_base 7^8: mod_base = OTHER; note = Methylphosphonate linkage
  misc_feature 1..29: note = RM114921
cgtctnatggacaaagtctttaagaccat

SEQ ID NO: 277 - DNA, 29 bp, synthetic construct
  source 1..29: mol_type = other DNA
  misc_feature 24..25: note = DNA
  misc_feature order(1..23,26..29): note = RNA
  modified_base 23: mod_base = OTHER; note = 2-Prime-O-Methoxyethyl modified 5-methyl Uridine
  modified_base 24: mod_base = OTHER; note = DNA nucleotide carrying a 6-amino-5-nitro-3-yl-2(1H)-pyridone nucleobase
  modified_base order(1..4,15,17,21,27): mod_base = OTHER; note = 2-Prime-Fluoro modified nucleoside
  modified_base order(5..14,16,18..20,22,26,28..29): mod_base = OTHER; note = 2-Prime-O-Methyl modified nucleoside
  modified_base order(1^2,28^29): mod_base = OTHER; note = (1,3-dimethylimidazolidin-2-ylidene) Phosphoramidate linkage
  modified_base order(2..25,26..28): mod_base = OTHER; note = Phosphorothioate linkage
  modified_base 25^26: mod_base = OTHER; note = Methylphosphonate linkage
  misc_feature 1..29: note = RM114922
gtcattaatttggcccttcgtctnatgga

SEQ ID NO: 278 - DNA, 26 bp, synthetic construct
  source 1..26: mol_type = other DNA
  misc_feature 22..23: note = DNA
  misc_feature order(1..21,24..26): note = RNA
  modified_base 21: mod_base = OTHER; note = 2-Prime-O-Methoxyethyl modified 5-methyl Uridine
  modified_base 22: mod_base = OTHER; note = DNA nucleotide carrying a 6-amino-5-nitro-3-yl-2(1H)-pyridone nucleobase
  modified_base order(2,13,15,19,25): mod_base = OTHER; note = 2-Prime-Fluoro modified nucleoside
  modified_base order(1,3..12,14,16..18,20,24,26): mod_base = OTHER; note = 2-Prime-O-Methyl modified nucleoside
  modified_base order(1^2,25^26): mod_base = OTHER; note = (1,3-dimethylimidazolidin-2-ylidene) Phosphoramidate linkage
  modified_base order(2..23,24^25): mod_base = OTHER; note = Phosphorothioate linkage
  modified_base 23^24: mod_base = OTHER; note = Methylphosphonate linkage
  misc_feature 1..26: note = RM114923
cattaatttggcccttcgtctnatgg

SEQ ID NO: 279 - DNA, 29 bp, synthetic construct
  source 1..29: mol_type = other DNA
  misc_feature 24..25: note = DNA
  misc_feature order(1..23,26..29): note = RNA
  modified_base 23: mod_base = OTHER; note = 2-Prime-O-Methoxyethyl modified 5-methyl Uridine
  modified_base 24: mod_base = OTHER; note = DNA nucleotide carrying a 6-amino-5-nitro-3-yl-2(1H)-pyridone nucleobase
  modified_base order(4,15,17,21,27): mod_base = OTHER; note = 2-Prime-Fluoro modified nucleoside
  modified_base order(1..3,5..14,16,18..20,22,26,28..29): mod_base = OTHER; note = 2-Prime-O-Methyl modified nucleoside
  modified_base order(1^2,28^29): mod_base = OTHER; note = (1,3-dimethylimidazolidin-2-ylidene) Phosphoramidate linkage
  modified_base order(2..25,26..28): mod_base = OTHER; note = Phosphorothioate linkage
  modified_base 25^26: mod_base = OTHER; note = Methylphosphonate linkage
  misc_feature 1..29: note = RM114924
gtcattaatttggcccttcgtctnatgga

SEQ ID NO: 280 - DNA, 29 bp, synthetic construct
  source 1..29: mol_type = other DNA
  misc_feature 21..22: note = DNA
  misc_feature order(1..20,23..29): note = RNA
  modified_base 20: mod_base = OTHER; note = 2-Prime-O-Methoxyethyl modified 5-methyl Uridine
  modified_base 21: mod_base = OTHER; note = DNA nucleotide carrying a 6-amino-5-nitro-3-yl-2(1H)-pyridone nucleobase
  modified_base order(1,12,14,18,24): mod_base = OTHER; note = 2-Prime-Fluoro modified nucleoside
  modified_base order(2..11,13,15..17,19,23,25..29): mod_base = OTHER; note = 2-Prime-O-Methyl modified nucleoside
  modified_base order(1^2,28^29): mod_base = OTHER; note = (1,3-dimethylimidazolidin-2-ylidene) Phosphoramidate linkage
  modified_base order(2..22,23..28): mod_base = OTHER; note = Phosphorothioate linkage
  modified_base 22^23: mod_base = OTHER; note = Methylphosphonate linkage
  misc_feature 1..29: note = RM114925
attaatttggcccttcgtctnatggacaa

SEQ ID NO: 281 - DNA, 32 bp, synthetic construct; identical to SEQ ID NO: 79
  source 1..32: mol_type = other DNA
  misc_feature 10..11: note = DNA
  misc_feature order(1..9,12..32): note = RNA
  modified_base 9: mod_base = OTHER; note = 2-Prime-O-Methoxyethyl modified 5-methyl Uridine
  modified_base 10: mod_base = OTHER; note = DNA nucleotide carrying a 6-amino-5-nitro-3-yl-2(1H)-pyridone nucleobase
  modified_base order(1,7,13,20,26,32): mod_base = OTHER; note = 2-Prime-Fluoro modified nucleoside
  modified_base order(2..6,8,12,14..19,21..25,27..31): mod_base = OTHER; note = 2-Prime-O-Methyl modified nucleoside
  modified_base order(1^2,31^32): mod_base = OTHER; note = (1,3-dimethylimidazolidin-2-ylidene) Phosphoramidate linkage
  modified_base order(2..11,12..31): mod_base = OTHER; note = Phosphorothioate linkage
  modified_base 11^12: mod_base = OTHER; note = Methylphosphonate linkage
  misc_feature 1..32: note = RM114926

SEQ ID NO: 282 - DNA, 23 bp, synthetic construct
  source 1..23: mol_type = other DNA
  misc_feature 6..7: note = DNA
  misc_feature order(1..5,8..23): note = RNA
  modified_base 5: mod_base = OTHER; note = 2-Prime-O-Methoxyethyl modified 5-methyl Uridine
  modified_base 6: mod_base = OTHER; note = DNA nucleotide carrying a 6-amino-5-nitro-3-yl-2(1H)-pyridone nucleobase
  modified_base order(3,9,16,22): mod_base = OTHER; note = 2-Prime-Fluoro modified nucleoside
  modified_base order(1..2,4,8,10..15,17..21,23): mod_base = OTHER; note = 2-Prime-O-Methyl modified nucleoside
  modified_base order(1^2,22^23): mod_base = OTHER; note = (1,3-dimethylimidazolidin-2-ylidene) Phosphoramidate linkage
  modified_base order(2..7,8..22): mod_base = OTHER; note = Phosphorothioate linkage
  modified_base 7^8: mod_base = OTHER; note = Methylphosphonate linkage
  misc_feature 1..23: note = RM114927
cgtctnatggacaaagtctttaa

SEQ ID NO: 283 - DNA, 23 bp, synthetic construct
  source 1..23: mol_type = other DNA
  misc_feature 18..19: note = DNA
  misc_feature order(1..17,20..23): note = RNA
  modified_base 17: mod_base = OTHER; note = 2-Prime-O-Methoxyethyl modified 5-methyl Uridine
  modified_base 18: mod_base = OTHER; note = DNA nucleotide carrying a 6-amino-5-nitro-3-yl-2(1H)-pyridone nucleobase
  modified_base order(4,10,21,23): mod_base = OTHER; note = 2-Prime-Fluoro modified nucleoside
  modified_base order(1..3,5..9,11..16,20,22): mod_base = OTHER; note = 2-Prime-O-Methyl modified nucleoside
  modified_base order(1^2,22^23): mod_base = OTHER; note = (1,3-dimethylimidazolidin-2-ylidene) Phosphoramidate linkage
  modified_base order(2..19,20..22): mod_base = OTHER; note = Phosphorothioate linkage
  modified_base 19^20: mod_base = OTHER; note = Methylphosphonate linkage
  misc_feature 1..23: note = RM114928
aatttggcccttcgtctnatgga

SEQ ID NO: 284 - DNA, 23 bp, synthetic construct
  source 1..23: mol_type = other DNA
  misc_feature 15..16: note = DNA
  misc_feature order(1..14,17..23): note = RNA
  modified_base 14: mod_base = OTHER; note = 2-Prime-O-Methoxyethyl modified 5-methyl Uridine
  modified_base 15: mod_base = OTHER; note = DNA nucleotide carrying a 6-amino-5-nitro-3-yl-2(1H)-pyridone nucleobase
  modified_base order(1,7,18,20): mod_base = OTHER; note = 2-Prime-Fluoro modified nucleoside
  modified_base order(2..6,8..13,17,19,21..23): mod_base = OTHER; note = 2-Prime-O-Methyl modified nucleoside
  modified_base order(1^2,22^23): mod_base = OTHER; note = (1,3-dimethylimidazolidin-2-ylidene) Phosphoramidate linkage
  modified_base order(2..16,17..22): mod_base = OTHER; note = Phosphorothioate linkage
  modified_base 16^17: mod_base = OTHER; note = Methylphosphonate linkage
  misc_feature 1..23: note = RM114929
ttggcccttcgtctnatggacaa

SEQ ID NO: 285 - DNA, 32 bp, synthetic construct; identical to SEQ ID NO: 75
  source 1..32: mol_type = other DNA
  misc_feature 22..23: note = DNA
  misc_feature order(1..21,24..32): note = RNA
  modified_base 21: mod_base = OTHER; note = 2-Prime-O-Methoxyethyl modified 5-methyl Uridine
  modified_base 22: mod_base = OTHER; note = DNA nucleotide carrying a 6-amino-5-nitro-3-yl-2(1H)-pyridone nucleobase
  modified_base order(4,7..8,10,25,30): mod_base = OTHER; note = 2-Prime-Fluoro modified nucleoside
  modified_base order(1..3,5..6,9,11..20,24,26..29,31..32): mod_base = OTHER; note = 2-Prime-O-Methyl modified nucleoside
  modified_base order(1^2,31^32): mod_base = OTHER; note = (1,3-dimethylimidazolidin-2-ylidene) Phosphoramidate linkage
  modified_base order(2..23,24..31): mod_base = OTHER; note = Phosphorothioate linkage
  modified_base 23^24: mod_base = OTHER; note = Methylphosphonate linkage
  misc_feature 1..32: note = RM114930

SEQ ID NO: 286 - DNA, 32 bp, synthetic construct; identical to SEQ ID NO: 76
  source 1..32: mol_type = other DNA
  misc_feature 19..20: note = DNA
  misc_feature order(1..18,21..32): note = RNA
  modified_base 18: mod_base = OTHER; note = 2-Prime-O-Methoxyethyl modified 5-methyl Uridine
  modified_base 19: mod_base = OTHER; note = DNA nucleotide carrying a 6-amino-5-nitro-3-yl-2(1H)-pyridone nucleobase
  modified_base order(1,4..5,7,22,27): mod_base = OTHER; note = 2-Prime-Fluoro modified nucleoside
  modified_base order(2..3,6,8..17,21,23..26,28..32): mod_base = OTHER; note = 2-Prime-O-Methyl modified nucleoside
  modified_base order(1^2,31^32): mod_base = OTHER; note = (1,3-dimethylimidazolidin-2-ylidene) Phosphoramidate linkage
  modified_base order(2..20,21..31): mod_base = OTHER; note = Phosphorothioate linkage
  modified_base 20^21: mod_base = OTHER; note = Methylphosphonate linkage
  misc_feature 1..32: note = RM114931

SEQ ID NO: 287 - DNA, 32 bp, synthetic construct; identical to SEQ ID NO: 79
  source 1..32: mol_type = other DNA
  misc_feature 10..11: note = DNA
  misc_feature order(1..9,12..32): note = RNA
  modified_base 9: mod_base = OTHER; note = 2-Prime-O-Methoxyethyl modified 5-methyl Uridine
  modified_base 10: mod_base = OTHER; note = DNA nucleotide carrying a 6-amino-5-nitro-3-yl-2(1H)-pyridone nucleobase
  modified_base order(4,13,24,26..27,30): mod_base = OTHER; note = 2-Prime-Fluoro modified nucleoside
  modified_base order(1..3,5..8,12,14..23,25,28..29,31..32): mod_base = OTHER; note = 2-Prime-O-Methyl modified nucleoside
  modified_base order(1^2,31^32): mod_base = OTHER; note = (1,3-dimethylimidazolidin-2-ylidene) Phosphoramidate linkage
  modified_base order(2..11,12..31): mod_base = OTHER; note = Phosphorothioate linkage
  modified_base 11^12: mod_base = OTHER; note = Methylphosphonate linkage
  misc_feature 1..32: note = RM114932

SEQ ID NO: 288 - DNA, 32 bp, synthetic construct; identical to SEQ ID NO: 80
  source 1..32: mol_type = other DNA
  misc_feature 7..8: note = DNA
  misc_feature order(1..6,9..32): note = RNA
  modified_base 6: mod_base = OTHER; note = 2-Prime-O-Methoxyethyl modified 5-methyl Uridine
  modified_base 7: mod_base = OTHER; note = DNA nucleotide carrying a 6-amino-5-nitro-3-yl-2(1H)-pyridone nucleobase
  modified_base order(1,10,21,23..24,27): mod_base = OTHER; note = 2-Prime-Fluoro modified nucleoside
  modified_base order(2..5,9,11..20,22,25..26,28..32): mod_base = OTHER; note = 2-Prime-O-Methyl modified nucleoside
  modified_base order(1^2,31^32): mod_base = OTHER; note = (1,3-dimethylimidazolidin-2-ylidene) Phosphoramidate linkage
  modified_base order(2..8,9..31): mod_base = OTHER; note = Phosphorothioate linkage
  modified_base 8^9: mod_base = OTHER; note = Methylphosphonate linkage
  misc_feature 1..32: note = RM114933

SEQ ID NO: 289 - DNA, 23 bp, synthetic construct
  source 1..23: mol_type = other DNA
  misc_feature 18..19: note = DNA
  misc_feature order(1..17,20..23): note = RNA
  modified_base 17: mod_base = OTHER; note = 2-Prime-O-Methoxyethyl modified 5-methyl Uridine
  modified_base 18: mod_base = OTHER; note = DNA nucleotide carrying a 6-amino-5-nitro-3-yl-2(1H)-pyridone nucleobase
  modified_base order(3..4,6,21): mod_base = OTHER; note = 2-Prime-Fluoro modified nucleoside
  modified_base order(1..2,5,7..16,20,22..23): mod_base = OTHER; note = 2-Prime-O-Methyl modified nucleoside
  modified_base order(1^2,22^23): mod_base = OTHER; note = (1,3-dimethylimidazolidin-2-ylidene) Phosphoramidate linkage
  modified_base order(2..19,20..22): mod_base = OTHER; note = Phosphorothioate linkage
  modified_base 19^20: mod_base = OTHER; note = Methylphosphonate linkage
  misc_feature 1..23: note = RM114934
aatttggcccttcgtctnatgga

SEQ ID NO: 290 - DNA, 23 bp, synthetic construct
  source 1..23: mol_type = other DNA
  misc_feature 18..19: note = DNA
  misc_feature order(1..17,20..23): note = RNA
  modified_base 17: mod_base = OTHER; note = 2-Prime-O-Methoxyethyl modified 5-methyl Uridine
  modified_base 18: mod_base = OTHER; note = DNA nucleotide carrying a 6-amino-5-nitro-3-yl-2(1H)-pyridone nucleobase
  modified_base order(6,21): mod_base = OTHER; note = 2-Prime-Fluoro modified nucleoside
  modified_base order(1..5,7..16,20,22..23): mod_base = OTHER; note = 2-Prime-O-Methyl modified nucleoside
  modified_base order(1^2,22^23): mod_base = OTHER; note = (1,3-dimethylimidazolidin-2-ylidene) Phosphoramidate linkage
  modified_base order(2..19,20..22): mod_base = OTHER; note = Phosphorothioate linkage
  modified_base 19^20: mod_base = OTHER; note = Methylphosphonate linkage
  misc_feature 1..23: note = RM114935
aatttggcccttcgtctnatgga

SEQ ID NO: 291 - DNA, 23 bp, synthetic construct
  source 1..23: mol_type = other DNA
  misc_feature 15..16: note = DNA
  misc_feature order(1..14,17..23): note = RNA
  modified_base 14: mod_base = OTHER; note = 2-Prime-O-Methoxyethyl modified 5-methyl Uridine
  modified_base 15: mod_base = OTHER; note = DNA nucleotide carrying a 6-amino-5-nitro-3-yl-2(1H)-pyridone nucleobase
  modified_base order(3,18): mod_base = OTHER; note = 2-Prime-Fluoro modified nucleoside
  modified_base order(1..2,4..13,17,19..23): mod_base = OTHER; note = 2-Prime-O-Methyl modified nucleoside
  modified_base order(1^2,22^23): mod_base = OTHER; note = (1,3-dimethylimidazolidin-2-ylidene) Phosphoramidate linkage
  modified_base order(2..16,17..22): mod_base = OTHER; note = Phosphorothioate linkage
  modified_base 16^17: mod_base = OTHER; note = Methylphosphonate linkage
  misc_feature 1..23: note = RM114936
ttggcccttcgtctnatggacaa

SEQ ID NO: 292 - DNA, 26 bp, synthetic construct
  source 1..26: mol_type = other DNA
  misc_feature 22..23: note = DNA
  misc_feature order(1..21,24..26): note = RNA
  modified_base 21: mod_base = OTHER; note = 2-Prime-O-Methoxyethyl modified 5-methyl Uridine
  modified_base 22: mod_base = OTHER; note = DNA nucleotide carrying a 6-amino-5-nitro-3-yl-2(1H)-pyridone nucleobase
  modified_base order(10,25): mod_base = OTHER; note = 2-Prime-Fluoro modified nucleoside
  modified_base order(1..9,11..20,24,26): mod_base = OTHER; note = 2-Prime-O-Methyl modified nucleoside
  modified_base order(1^2,25^26): mod_base = OTHER; note = (1,3-dimethylimidazolidin-2-ylidene) Phosphoramidate linkage
  modified_base order(2..23,24^25): mod_base = OTHER; note = Phosphorothioate linkage
  modified_base 23^24: mod_base = OTHER; note = Methylphosphonate linkage
  misc_feature 1..26: note = RM114937
cattaatttggcccttcgtctnatgg

SEQ ID NO: 293 - DNA, 26 bp, synthetic construct
  source 1..26: mol_type = other DNA
  misc_feature 19..20: note = DNA
  misc_feature order(1..18,21..26): note = RNA
  modified_base 18: mod_base = OTHER; note = 2-Prime-O-Methoxyethyl modified 5-methyl Uridine
  modified_base 19: mod_base = OTHER; note = DNA nucleotide carrying a 6-amino-5-nitro-3-yl-2(1H)-pyridone nucleobase
  modified_base order(7,22): mod_base = OTHER; note = 2-Prime-Fluoro modified nucleoside
  modified_base order(1..6,8..17,21,23..26): mod_base = OTHER; note = 2-Prime-O-Methyl modified nucleoside
  modified_base order(1^2,25^26): mod_base = OTHER; note = (1,3-dimethylimidazolidin-2-ylidene) Phosphoramidate linkage
  modified_base order(2..20,21..25): mod_base = OTHER; note = Phosphorothioate linkage
  modified_base 20^21: mod_base = OTHER; note = Methylphosphonate linkage
  misc_feature 1..26: note = RM114938
taatttggcccttcgtctnatggaca

SEQ ID NO: 294 - DNA, 26 bp, synthetic construct
  source 1..26: mol_type = other DNA
  misc_feature 16..17: note = DNA
  misc_feature order(1..15,18..26): note = RNA
  modified_base 15: mod_base = OTHER; note = 2-Prime-O-Methoxyethyl modified 5-methyl Uridine
  modified_base 16: mod_base = OTHER; note = DNA nucleotide carrying a 6-amino-5-nitro-3-yl-2(1H)-pyridone nucleobase
  modified_base order(4,19): mod_base = OTHER; note = 2-Prime-Fluoro modified nucleoside
  modified_base order(1..3,5..14,18,20..26): mod_base = OTHER; note = 2-Prime-O-Methyl modified nucleoside
  modified_base order(1^2,25^26): mod_base = OTHER; note = (1,3-dimethylimidazolidin-2-ylidene) Phosphoramidate linkage
  modified_base order(2..17,18..25): mod_base = OTHER; note = Phosphorothioate linkage
  modified_base 17^18: mod_base = OTHER; note = Methylphosphonate linkage
  misc_feature 1..26: note = RM114939
tttggcccttcgtctnatggacaaag

SEQ ID NO: 295 - DNA, 26 bp, synthetic construct
  source 1..26: mol_type = other DNA
  misc_feature 13..14: note = DNA
  misc_feature order(1..12,15..26): note = RNA
  modified_base 12: mod_base = OTHER; note = 2-Prime-O-Methoxyethyl modified 5-methyl Uridine
  modified_base 13: mod_base = OTHER; note = DNA nucleotide carrying a 6-amino-5-nitro-3-yl-2(1H)-pyridone nucleobase
  modified_base order(1,16): mod_base = OTHER; note = 2-Prime-Fluoro modified nucleoside
  modified_base order(2..11,15,17..26): mod_base = OTHER; note = 2-Prime-O-Methyl modified nucleoside
  modified_base order(1^2,25^26): mod_base = OTHER; note = (1,3-dimethylimidazolidin-2-ylidene) Phosphoramidate linkage
  modified_base order(2..14,15..25): mod_base = OTHER; note = Phosphorothioate linkage
  modified_base 14^15: mod_base = OTHER; note = Methylphosphonate linkage
  misc_feature 1..26: note = RM114940
ggcccttcgtctnatggacaaagtct

SEQ ID NO: 296 - DNA, 29 bp, synthetic construct
  source 1..29: mol_type = other DNA
  misc_feature 24..25: note = DNA
  misc_feature order(1..23,26..29): note = RNA
  modified_base 23: mod_base = OTHER; note = 2-Prime-O-Methoxyethyl modified 5-methyl Uridine
  modified_base 24: mod_base = OTHER; note = DNA nucleotide carrying a 6-amino-5-nitro-3-yl-2(1H)-pyridone nucleobase
  modified_base order(12,27): mod_base = OTHER; note = 2-Prime-Fluoro modified nucleoside
  modified_base order(1..11,13..22,26,28..29): mod_base = OTHER; note = 2-Prime-O-Methyl modified nucleoside
  modified_base order(1^2,28^29): mod_base = OTHER; note = (1,3-dimethylimidazolidin-2-ylidene) Phosphoramidate linkage
  modified_base order(2..25,26..28): mod_base = OTHER; note = Phosphorothioate linkage
  modified_base 25^26: mod_base = OTHER; note = Methylphosphonate linkage
  misc_feature 1..29: note = RM114941
gtcattaatttggcccttcgtctnatgga

SEQ ID NO: 297 - DNA, 29 bp, synthetic construct
  source 1..29: mol_type = other DNA
  misc_feature 21..22: note = DNA
  misc_feature order(1..20,23..29): note = RNA
  modified_base 20: mod_base = OTHER; note = 2-Prime-O-Methoxyethyl modified 5-methyl Uridine
  modified_base 21: mod_base = OTHER; note = DNA nucleotide carrying a 6-amino-5-nitro-3-yl-2(1H)-pyridone nucleobase
  modified_base order(9,24): mod_base = OTHER; note = 2-Prime-Fluoro modified nucleoside
  modified_base order(1..8,10..19,23,25..29): mod_base = OTHER; note = 2-Prime-O-Methyl modified nucleoside
  modified_base order(1^2,28^29): mod_base = OTHER; note = (1,3-dimethylimidazolidin-2-ylidene) Phosphoramidate linkage
  modified_base order(2..22,23..28): mod_base = OTHER; note = Phosphorothioate linkage
  modified_base 22^23: mod_base = OTHER; note = Methylphosphonate linkage
  misc_feature 1..29: note = RM114942
attaatttggcccttcgtctnatggacaa

SEQ ID NO: 298 - DNA, 29 bp, synthetic construct
  source 1..29: mol_type = other DNA
  misc_feature 18..19: note = DNA
  misc_feature order(1..17,20..29): note = RNA
  modified_base 17: mod_base = OTHER; note = 2-Prime-O-Methoxyethyl modified 5-methyl Uridine
  modified_base 18: mod_base = OTHER; note = DNA nucleotide carrying a 6-amino-5-nitro-3-yl-2(1H)-pyridone nucleobase
  modified_base order(6,21): mod_base = OTHER; note = 2-Prime-Fluoro modified nucleoside
  modified_base order(1..5,7..16,20,22..29): mod_base = OTHER; note = 2-Prime-O-Methyl modified nucleoside
  modified_base order(1^2,28^29): mod_base = OTHER; note = (1,3-dimethylimidazolidin-2-ylidene) Phosphoramidate linkage
  modified_base order(2..19,20..28): mod_base = OTHER; note = Phosphorothioate linkage
  modified_base 19^20: mod_base = OTHER; note = Methylphosphonate linkage
  misc_feature 1..29: note = RM114943
aatttggcccttcgtctnatggacaaagt

SEQ ID NO: 299 - DNA, 29 bp, synthetic construct
  source 1..29: mol_type = other DNA
  misc_feature 15..16: note = DNA
  misc_feature order(1..14,17..29): note = RNA
  modified_base 14: mod_base = OTHER; note = 2-Prime-O-Methoxyethyl modified 5-methyl Uridine
  modified_base 15: mod_base = OTHER; note = DNA nucleotide carrying a 6-amino-5-nitro-3-yl-2(1H)-pyridone nucleobase
  modified_base order(3,18): mod_base = OTHER; note = 2-Prime-Fluoro modified nucleoside
  modified_base order(1..2,4..13,17,19..29): mod_base = OTHER; note = 2-Prime-O-Methyl modified nucleoside
  modified_base order(1^2,28^29): mod_base = OTHER; note = (1,3-dimethylimidazolidin-2-ylidene) Phosphoramidate linkage
  modified_base order(2..16,17..28): mod_base = OTHER; note = Phosphorothioate linkage
  modified_base 16^17: mod_base = OTHER; note = Methylphosphonate linkage
  misc_feature 1..29: note = RM114944
ttggcccttcgtctnatggacaaagtctt

SEQ ID NO: 300 - DNA, 32 bp, synthetic construct; identical to SEQ ID NO: 74
  source 1..32: mol_type = other DNA
  misc_feature 25..26: note = DNA
  misc_feature order(1..24,27..32): note = RNA
  modified_base 24: mod_base = OTHER; note = 2-Prime-O-Methoxyethyl modified 5-methyl Uridine
  modified_base 25: mod_base = OTHER; note = DNA nucleotide carrying a 6-amino-5-nitro-3-yl-2(1H)-pyridone nucleobase
  modified_base order(1,11,14,23,28,30): mod_base = OTHER; note = 2-Prime-Fluoro modified nucleoside
  modified_base order(2..10,12..13,15..22,27,29,31..32): mod_base = OTHER; note = 2-Prime-O-Methyl modified nucleoside
  modified_base order(1^2,31^32): mod_base = OTHER; note = (1,3-dimethylimidazolidin-2-ylidene) Phosphoramidate linkage
  modified_base order(2..26,27..31): mod_base = OTHER; note = Phosphorothioate linkage
  modified_base 26^27: mod_base = OTHER; note = Methylphosphonate linkage
  misc_feature 1..32: note = RM114945

SEQ ID NO: 301 - DNA, 23 bp, synthetic construct
  source 1..23: mol_type = other DNA
  misc_feature 18..19: note = DNA
  misc_feature order(1..17,20..23): note = RNA
  modified_base 17: mod_base = OTHER; note = 2-Prime-O-Methoxyethyl modified 5-methyl Uridine
  modified_base 18: mod_base = OTHER; note = DNA nucleotide carrying a 6-amino-5-nitro-3-yl-2(1H)-pyridone nucleobase
  modified_base order(4,7,16,21): mod_base = OTHER; note = 2-Prime-Fluoro modified nucleoside
  modified_base order(1..3,5..6,8..15,20,22..23): mod_base = OTHER; note = 2-Prime-O-Methyl modified nucleoside
  modified_base order(1^2,22^23): mod_base = OTHER; note = (1,3-dimethylimidazolidin-2-ylidene) Phosphoramidate linkage
  modified_base order(2..19,20..22): mod_base = OTHER; note = Phosphorothioate linkage
  modified_base 19^20: mod_base = OTHER; note = Methylphosphonate linkage
  misc_feature 1..23: note = RM114946
aatttggcccttcgtctnatgga

SEQ ID NO: 302 - DNA, 23 bp, synthetic construct
  source 1..23: mol_type = other DNA
  misc_feature 15..16: note = DNA
  misc_feature order(1..14,17..23): note = RNA
  modified_base 14: mod_base = OTHER; note = 2-Prime-O-Methoxyethyl modified 5-methyl Uridine
  modified_base 15: mod_base = OTHER; note = DNA nucleotide carrying a 6-amino-5-nitro-3-yl-2(1H)-pyridone nucleobase
  modified_base order(1,4,13,18): mod_base = OTHER; note = 2-Prime-Fluoro modified nucleoside
  modified_base order(2..3,5..12,17,19..23): mod_base = OTHER; note = 2-Prime-O-Methyl modified nucleoside
  modified_base order(1^2,22^23): mod_base = OTHER; note = (1,3-dimethylimidazolidin-2-ylidene) Phosphoramidate linkage
  modified_base order(2..16,17..22): mod_base = OTHER; note = Phosphorothioate linkage
  modified_base 16^17: mod_base = OTHER; note = Methylphosphonate linkage
  misc_feature 1..23: note = RM114947
ttggcccttcgtctnatggacaa

SEQ ID NO: 303 - DNA, 32 bp, synthetic construct; identical to SEQ ID NO: 73
  source 1..32: mol_type = other DNA
  misc_feature 28..29: note = DNA
  misc_feature order(1..27,30..32): note = RNA
  modified_base 27: mod_base = OTHER; note = 2-Prime-O-Methoxyethyl modified 5-methyl Uridine
  modified_base 28: mod_base = OTHER; note = DNA nucleotide carrying a 6-amino-5-nitro-3-yl-2(1H)-pyridone nucleobase
  modified_base order(1,12..13,21,24,31): mod_base = OTHER; note = 2-Prime-Fluoro modified nucleoside
  modified_base order(2..11,14..20,22..23,25..26,30,32): mod_base = OTHER; note = 2-Prime-O-Methyl modified nucleoside
  modified_base order(1^2,31^32): mod_base = OTHER; note = (1,3-dimethylimidazolidin-2-ylidene) Phosphoramidate linkage
  modified_base order(2..29,30^31): mod_base = OTHER; note = Phosphorothioate linkage
  modified_base 29^30: mod_base = OTHER; note = Methylphosphonate linkage
  misc_feature 1..32: note = RM114948

SEQ ID NO: 304 - DNA, 23 bp, synthetic construct
  source 1..23: mol_type = other DNA
  misc_feature 18..19: note = DNA
  misc_feature order(1..17,20..23): note = RNA
  modified_base 17: mod_base = OTHER; note = 2-Prime-O-Methoxyethyl modified 5-methyl Uridine
  modified_base 18: mod_base = OTHER; note = DNA nucleotide carrying a 6-amino-5-nitro-3-yl-2(1H)-pyridone nucleobase
  modified_base order(3,11,14,21): mod_base = OTHER; note = 2-Prime-Fluoro modified nucleoside
  modified_base order(1..2,4..10,12..13,15..16,20,22..23): mod_base = OTHER; note = 2-Prime-O-Methyl modified nucleoside
  modified_base order(1^2,22^23): mod_base = OTHER; note = (1,3-dimethylimidazolidin-2-ylidene) Phosphoramidate linkage
  modified_base order(2..19,20..22): mod_base = OTHER; note = Phosphorothioate linkage
  modified_base 19^20: mod_base = OTHER; note = Methylphosphonate linkage
  misc_feature 1..23: note = RM114949
aatttggcccttcgtctnatgga

SEQ ID NO: 305 - DNA, 32 bp, synthetic construct; identical to SEQ ID NO: 77
  source 1..32: mol_type = other DNA
  misc_feature 16..17: note = DNA
  misc_feature order(1..15,18..32): note = RNA
  modified_base 15: mod_base = OTHER; note = 2-Prime-O-Methoxyethyl modified 5-methyl Uridine
  modified_base 16: mod_base = OTHER; note = DNA nucleotide carrying a 6-amino-5-nitro-3-yl-2(1H)-pyridone nucleobase
  modified_base order(2,5..6,13,19..22,31): mod_base = OTHER; note = 2-Prime-Fluoro modified nucleoside
  modified_base order(1,3..4,7..12,14,18,23..30,32): mod_base = OTHER; note = 2-Prime-O-Methyl modified nucleoside
  modified_base order(1^2,31^32): mod_base = OTHER; note = (1,3-dimethylimidazolidin-2-ylidene) Phosphoramidate linkage
  modified_base order(2..17,18..31): mod_base = OTHER; note = Phosphorothioate linkage
  modified_base 17^18: mod_base = OTHER; note = Methylphosphonate linkage
  misc_feature 1..32: note = RM114950

SEQ ID NO: 306 - DNA, 32 bp, synthetic construct; identical to SEQ ID NO: 77
  source 1..32: mol_type = other DNA
  misc_feature 16..17: note = DNA
  misc_feature order(1..15,18..32): note = RNA
  modified_base 15: mod_base = OTHER; note = 2-Prime-O-Methoxyethyl modified 5-methyl Uridine
  modified_base 16: mod_base = OTHER; note = DNA nucleotide carrying a 6-amino-5-nitro-3-yl-2(1H)-pyridone nucleobase
  modified_base order(3,12..14,19,21,28..29,32): mod_base = OTHER; note = 2-Prime-Fluoro modified nucleoside
  modified_base order(1..2,4..11,18,20,22..27,30..31): mod_base = OTHER; note = 2-Prime-O-Methyl modified nucleoside
  modified_base order(1^2,31^32): mod_base = OTHER; note = (1,3-dimethylimidazolidin-2-ylidene) Phosphoramidate linkage
  modified_base order(2..17,18..31): mod_base = OTHER; note = Phosphorothioate linkage
  modified_base 17^18: mod_base = OTHER; note = Methylphosphonate linkage
  misc_feature 1..32: note = RM114951

SEQ ID NO: 307 - DNA, 23 bp, synthetic construct
  source 1..23: mol_type = other DNA
  misc_feature 18..19: note = DNA
  misc_feature order(1..17,20..23): note = RNA
  modified_base 17: mod_base = OTHER; note = 2-Prime-O-Methoxyethyl modified 5-methyl Uridine
  modified_base 18: mod_base = OTHER; note = DNA nucleotide carrying a 6-amino-5-nitro-3-yl-2(1H)-pyridone nucleobase
  modified_base order(7..8,15,21..23): mod_base = OTHER; note = 2-Prime-Fluoro modified nucleoside
  modified_base order(1..6,9..14,16,20): mod_base = OTHER; note = 2-Prime-O-Methyl modified nucleoside
  modified_base order(1^2,22^23): mod_base = OTHER; note = (1,3-dimethylimidazolidin-2-ylidene) Phosphoramidate linkage
  modified_base order(2..19,20..22): mod_base = OTHER; note = Phosphorothioate linkage
  modified_base 19^20: mod_base = OTHER; note = Methylphosphonate linkage
  misc_feature 1..23: note = RM114952
aatttggcccttcgtctnatgga

SEQ ID NO: 308 - DNA, 23 bp, synthetic construct
  source 1..23: mol_type = other DNA
  misc_feature 15..16: note = DNA
  misc_feature order(1..14,17..23): note = RNA
  modified_base 14: mod_base = OTHER; note = 2-Prime-O-Methoxyethyl modified 5-methyl Uridine
  modified_base 15: mod_base = OTHER; note = DNA nucleotide carrying a 6-amino-5-nitro-3-yl-2(1H)-pyridone nucleobase
  modified_base order(4..5,12,18..20): mod_base = OTHER; note = 2-Prime-Fluoro modified nucleoside
  modified_base order(1..3,6..11,13,17,21..23): mod_base = OTHER; note = 2-Prime-O-Methyl modified nucleoside
  modified_base order(1^2,22^23): mod_base = OTHER; note = (1,3-dimethylimidazolidin-2-ylidene) Phosphoramidate linkage
  modified_base order(2..16,17..22): mod_base = OTHER; note = Phosphorothioate linkage
  modified_base 16^17: mod_base = OTHER; note = Methylphosphonate linkage
  misc_feature 1..23: note = RM114953
ttggcccttcgtctnatggacaa

SEQ ID NO: 309 - DNA, 23 bp, synthetic construct
  source 1..23: mol_type = other DNA
  misc_feature 12..13: note = DNA
  misc_feature order(1..11,14..23): note = RNA
  modified_base 11: mod_base = OTHER; note = 2-Prime-O-Methoxyethyl modified 5-methyl Uridine
  modified_base 12: mod_base = OTHER; note = DNA nucleotide carrying a 6-amino-5-nitro-3-yl-2(1H)-pyridone nucleobase
  modified_base order(1..2,9,15..17): mod_base = OTHER; note = 2-Prime-Fluoro modified nucleoside
  modified_base order(3..8,10,14,18..23): mod_base = OTHER; note = 2-Prime-O-Methyl modified nucleoside
  modified_base order(1^2,22^23): mod_base = OTHER; note = (1,3-dimethylimidazolidin-2-ylidene) Phosphoramidate linkage
  modified_base order(2..13,14..22): mod_base = OTHER; note = Phosphorothioate linkage
  modified_base 13^14: mod_base = OTHER; note = Methylphosphonate linkage
  misc_feature 1..23: note = RM114954
gcccttcgtctnatggacaaagt

SEQ ID NO: 310 - DNA, 32 bp, synthetic construct; identical to SEQ ID NO: 74
  source 1..32: mol_type = other DNA
  misc_feature 25..26: note = DNA
  misc_feature order(1..24,27..32): note = RNA
  modified_base 24: mod_base = OTHER; note = 2-Prime-O-Methoxyethyl modified 5-methyl Uridine
  modified_base 25: mod_base = OTHER; note = DNA nucleotide carrying a 6-amino-5-nitro-3-yl-2(1H)-pyridone nucleobase
  modified_base order(14..15,22,28..30): mod_base = OTHER; note = 2-Prime-Fluoro modified nucleoside
  modified_base order(1..13,16..21,23,27,31..32): mod_base = OTHER; note = 2-Prime-O-Methyl modified nucleoside
  modified_base order(1^2,31^32): mod_base = OTHER; note = (1,3-dimethylimidazolidin-2-ylidene) Phosphoramidate linkage
  modified_base order(2..26,27..31): mod_base = OTHER; note = Phosphorothioate linkage
  modified_base 26^27: mod_base = OTHER; note = Methylphosphonate linkage
  misc_feature 1..32: note = RM114955

SEQ ID NO: 311 - DNA, 32 bp, synthetic construct; identical to SEQ ID NO: 75
  source 1..32: mol_type = other DNA
  misc_feature 22..23: note = DNA
  misc_feature order(1..21,24..32): note = RNA
  modified_base 21: mod_base = OTHER; note = 2-Prime-O-Methoxyethyl modified 5-methyl Uridine
  modified_base 22: mod_base = OTHER; note = DNA nucleotide carrying a 6-amino-5-nitro-3-yl-2(1H)-pyridone nucleobase
  modified_base order(11..12,19,25..27): mod_base = OTHER; note = 2-Prime-Fluoro modified nucleoside
  modified_base order(1..10,13..18,20,24,28..32): mod_base = OTHER; note = 2-Prime-O-Methyl modified nucleoside
  modified_base order(1^2,31^32): mod_base = OTHER; note = (1,3-dimethylimidazolidin-2-ylidene) Phosphoramidate linkage
  modified_base order(2..23,24..31): mod_base = OTHER; note = Phosphorothioate linkage
  modified_base 23^24: mod_base = OTHER; note = Methylphosphonate linkage
  misc_feature 1..32: note = RM114956

SEQ ID NO: 312 - DNA, 32 bp, synthetic construct; identical to SEQ ID NO: 76
  source 1..32: mol_type = other DNA
  misc_feature 19..20: note = DNA
  misc_feature order(1..18,21..32): note = RNA
  modified_base 18: mod_base = OTHER; note = 2-Prime-O-Methoxyethyl modified 5-methyl Uridine
  modified_base 19: mod_base = OTHER; note = DNA nucleotide carrying a 6-amino-5-nitro-3-yl-2(1H)-pyridone nucleobase
  modified_base order(8..9,16,22..24): mod_base = OTHER; note = 2-Prime-Fluoro modified nucleoside
  modified_base order(1..7,10..15,17,21,25..32): mod_base = OTHER; note = 2-Prime-O-Methyl modified nucleoside
  modified_base order(1^2,31^32): mod_base = OTHER; note = (1,3-dimethylimidazolidin-2-ylidene) Phosphoramidate linkage
  modified_base order(2..20,21..31): mod_base = OTHER; note = Phosphorothioate linkage
  modified_base 20^21: mod_base = OTHER; note = Methylphosphonate linkage
  misc_feature 1..32: note = RM114957

SEQ ID NO: 313 - DNA, 32 bp, synthetic construct; identical to SEQ ID NO: 77
  source 1..32: mol_type = other DNA
  misc_feature 16..17: note = DNA
  misc_feature order(1..15,18..32): note = RNA
  modified_base 15: mod_base = OTHER; note = 2-Prime-O-Methoxyethyl modified 5-methyl Uridine
  modified_base 16: mod_base = OTHER; note = DNA nucleotide carrying a 6-amino-5-nitro-3-yl-2(1H)-pyridone nucleobase
  modified_base order(5..6,13,19..21): mod_base = OTHER; note = 2-Prime-Fluoro modified nucleoside
  modified_base order(1..4,7..12,14,18,22..32): mod_base = OTHER; note = 2-Prime-O-Methyl modified nucleoside
  modified_base order(1^2,31^32): mod_base = OTHER; note = (1,3-dimethylimidazolidin-2-ylidene) Phosphoramidate linkage
  modified_base order(2..17,18..31): mod_base = OTHER; note = Phosphorothioate linkage
  modified_base 17^18: mod_base = OTHER; note = Methylphosphonate linkage
  misc_feature 1..32: note = RM114958

SEQ ID NO: 314 - DNA, 32 bp, synthetic construct; identical to SEQ ID NO: 78
  source 1..32: mol_type = other DNA
  misc_feature 13..14: note = DNA
  misc_feature order(1..12,15..32): note = RNA
  modified_base 12: mod_base = OTHER; note = 2-Prime-O-Methoxyethyl modified 5-methyl Uridine
  modified_base 13: mod_base = OTHER; note = DNA nucleotide carrying a 6-amino-5-nitro-3-yl-2(1H)-pyridone nucleobase
  modified_base order(2..3,10,16..18): mod_base = OTHER; note = 2-Prime-Fluoro modified nucleoside
  modified_base order(1,4..9,11,15,19..32): mod_base = OTHER; note = 2-Prime-O-Methyl modified nucleoside
  modified_base order(1^2,31^32): mod_base = OTHER; note = (1,3-dimethylimidazolidin-2-ylidene) Phosphoramidate linkage
  modified_base order(2..14,15..31): mod_base = OTHER; note = Phosphorothioate linkage
  modified_base 14^15: mod_base = OTHER; note = Methylphosphonate linkage
  misc_feature 1..32: note = RM114959

SEQ ID NO: 315 - DNA, 23 bp, synthetic construct
  source 1..23: mol_type = other DNA
  misc_feature 9..10: note = DNA
  misc_feature order(1..8,11..23): note = RNA
  modified_base 8: mod_base = OTHER; note = 2-Prime-O-Methoxyethyl modified 5-methyl Uridine
  modified_base 9: mod_base = OTHER; note = DNA nucleotide carrying a 6-amino-5-nitro-3-yl-2(1H)-pyridone nucleobase
  modified_base order(6..7,12,14,21..22): mod_base = OTHER; note = 2-Prime-Fluoro modified nucleoside
  modified_base order(1..5,11,13,15..20,23): mod_base = OTHER; note = 2-Prime-O-Methyl modified nucleoside
  modified_base order(1^2,22^23): mod_base = OTHER; note = (1,3-dimethylimidazolidin-2-ylidene) Phosphoramidate linkage
  modified_base order(2..10,11..22): mod_base = OTHER; note = Phosphorothioate linkage
  modified_base 10^11: mod_base = OTHER; note = Methylphosphonate linkage
  misc_feature 1..23: note = RM114960
cttcgtctnatggacaaagtctt

SEQ ID NO: 316 - DNA, 23 bp, synthetic construct
  source 1..23: mol_type = other DNA
  misc_feature 6..7: note = DNA
  misc_feature order(1..5,8..23): note = RNA
  modified_base 5: mod_base = OTHER; note = 2-Prime-O-Methoxyethyl modified 5-methyl Uridine
  modified_base 6: mod_base = OTHER; note = DNA nucleotide carrying a 6-amino-5-nitro-3-yl-2(1H)-pyridone nucleobase
  modified_base order(3..4,9,11,18..19): mod_base = OTHER; note = 2-Prime-Fluoro modified nucleoside
  modified_base order(1..2,8,10,12..17,20..23): mod_base = OTHER; note = 2-Prime-O-Methyl modified nucleoside
  modified_base order(1^2,22^23): mod_base = OTHER; note = (1,3-dimethylimidazolidin-2-ylidene) Phosphoramidate linkage
  modified_base order(2..7,8..22): mod_base = OTHER; note = Phosphorothioate linkage
  modified_base 7^8: mod_base = OTHER; note = Methylphosphonate linkage
  misc_feature 1..23: note = RM114961
cgtctnatggacaaagtctttaa

SEQ ID NO: 317 - DNA, 32 bp, synthetic construct; identical to SEQ ID NO: 76
  source 1..32: mol_type = other DNA
  misc_feature 19..20: note = DNA
  misc_feature order(1..18,21..32): note = RNA
  modified_base 18: mod_base = OTHER; note = 2-Prime-O-Methoxyethyl modified 5-methyl Uridine
  modified_base 19: mod_base = OTHER; note = DNA nucleotide carrying a 6-amino-5-nitro-3-yl-2(1H)-pyridone nucleobase
  modified_base order(16..17,22,24,31..32): mod_base = OTHER; note = 2-Prime-Fluoro modified nucleoside
  modified_base order(1..15,21,23,25..30): mod_base = OTHER; note = 2-Prime-O-Methyl modified nucleoside
  modified_base order(1^2,31^32): mod_base = OTHER; note = (1,3-dimethylimidazolidin-2-ylidene) Phosphoramidate linkage
  modified_base order(2..20,21..31): mod_base = OTHER; note = Phosphorothioate linkage
  modified_base 20^21: mod_base = OTHER; note = Methylphosphonate linkage
  misc_feature 1..32: note = RM114962

SEQ ID NO: 318 - DNA, 32 bp, synthetic construct; identical to SEQ ID NO: 77
  source 1..32: mol_type = other DNA
  misc_feature 16..17: note = DNA
  misc_feature order(1..15,18..32): note = RNA
  modified_base 15: mod_base = OTHER; note = 2-Prime-O-Methoxyethyl modified 5-methyl Uridine
  modified_base 16: mod_base = OTHER; note = DNA nucleotide carrying a 6-amino-5-nitro-3-yl-2(1H)-pyridone nucleobase
  modified_base order(13..14,19,21,28..29): mod_base = OTHER; note = 2-Prime-Fluoro modified nucleoside
  modified_base order(1..12,18,20,22..27,30..32): mod_base = OTHER; note = 2-Prime-O-Methyl modified nucleoside
  modified_base order(1^2,31^32): mod_base = OTHER; note = (1,3-dimethylimidazolidin-2-ylidene) Phosphoramidate linkage
  modified_base order(2..17,18..31): mod_base = OTHER; note = Phosphorothioate linkage
  modified_base 17^18: mod_base = OTHER; note = Methylphosphonate linkage
  misc_feature 1..32: note = RM114963

SEQ ID NO: 319 - DNA, 32 bp, synthetic construct; identical to SEQ ID NO: 78
  source 1..32: mol_type = other DNA
  misc_feature 13..14: note = DNA
  misc_feature order(1..12,15..32): note = RNA
  modified_base 12: mod_base = OTHER; note = 2-Prime-O-Methoxyethyl modified 5-methyl Uridine
  modified_base 13: mod_base = OTHER; note = DNA nucleotide carrying a 6-amino-5-nitro-3-yl-2(1H)-pyridone nucleobase
  modified_base order(10..11,16,18,25..26): mod_base = OTHER; note = 2-Prime-Fluoro modified nucleoside
  modified_base order(1..9,15,17,19..24,27..32): mod_base = OTHER; note = 2-Prime-O-Methyl modified nucleoside
  modified_base order(1^2,31^32): mod_base = OTHER; note = (1,3-dimethylimidazolidin-2-ylidene) Phosphoramidate linkage
  modified_base order(2..14,15..31): mod_base = OTHER; note = Phosphorothioate linkage
  modified_base 14^15: mod_base = OTHER; note = Methylphosphonate linkage
  misc_feature 1..32: note = RM114964

SEQ ID NO: 320 - DNA, 32 bp, synthetic construct; identical to SEQ ID NO: 79
  source 1..32: mol_type = other DNA
  misc_feature 10..11: note = DNA
  misc_feature order(1..9,12..32): note = RNA
  modified_base 9: mod_base = OTHER; note = 2-Prime-O-Methoxyethyl modified 5-methyl Uridine
  modified_base 10: mod_base = OTHER; note = DNA nucleotide carrying a 6-amino-5-nitro-3-yl-2(1H)-pyridone nucleobase
  modified_base order(7..8,13,15,22..23): mod_base = OTHER; note = 2-Prime-Fluoro modified nucleoside
  modified_base order(1..6,12,14,16..21,24..32): mod_base = OTHER; note = 2-Prime-O-Methyl modified nucleoside
  modified_base order(1^2,31^32): mod_base = OTHER; note = (1,3-dimethylimidazolidin-2-ylidene) Phosphoramidate linkage
  modified_base order(2..11,12..31): mod_base = OTHER; note = Phosphorothioate linkage
  modified_base 11^12: mod_base = OTHER; note = Methylphosphonate linkage
  misc_feature 1..32: note = RM114965

SEQ ID NO: 321 - DNA, 32 bp, synthetic construct; identical to SEQ ID NO: 80
  source 1..32: mol_type = other DNA
  misc_feature 7..8: note = DNA
  misc_feature order(1..6,9..32): note = RNA
  modified_base 6: mod_base = OTHER; note = 2-Prime-O-Methoxyethyl modified 5-methyl Uridine
  modified_base 7: mod_base = OTHER; note = DNA nucleotide carrying a 6-amino-5-nitro-3-yl-2(1H)-pyridone nucleobase
  modified_base order(4..5,10,12,19..20): mod_base = OTHER; note = 2-Prime-Fluoro modified nucleoside
  modified_base order(1..3,9,11,13..18,21..32): mod_base = OTHER; note = 2-Prime-O-Methyl modified nucleoside
  modified_base order(1^2,31^32): mod_base = OTHER; note = (1,3-dimethylimidazolidin-2-ylidene) Phosphoramidate linkage
  modified_base order(2..8,9..31): mod_base = OTHER; note = Phosphorothioate linkage
  modified_base 8^9: mod_base = OTHER; note = Methylphosphonate linkage
  misc_feature 1..32: note = RM114966

SEQ ID NO: 322 - DNA, 32 bp, synthetic construct; identical to SEQ ID NO: 73
  source 1..32: mol_type = other DNA
  misc_feature 28..29: note = DNA
  misc_feature order(1..27,30..32): note = RNA
  modified_base 27: mod_base = OTHER; note = 2-Prime-O-Methoxyethyl modified 5-methyl Uridine
  modified_base 28: mod_base = OTHER; note = DNA nucleotide carrying a 6-amino-5-nitro-3-yl-2(1H)-pyridone nucleobase
  modified_base order(25,31..32): mod_base = OTHER; note = 2-Prime-Fluoro modified nucleoside
  modified_base order(1..24,26,30): mod_base = OTHER; note = 2-Prime-O-Methyl modified nucleoside
  modified_base order(1^2,31^32): mod_base = OTHER; note = (1,3-dimethylimidazolidin-2-ylidene) Phosphoramidate linkage
  modified_base order(2..29,30^31): mod_base = OTHER; note = Phosphorothioate linkage
  modified_base 29^30: mod_base = OTHER; note = Methylphosphonate linkage
  misc_feature 1..32: note = RM114967

SEQ ID NO: 323 - DNA, 32 bp, synthetic construct; identical to SEQ ID NO: 74
  source 1..32: mol_type = other DNA
  misc_feature 25..26: note = DNA
  misc_feature order(1..24,27..32): note = RNA
  modified_base 24: mod_base = OTHER; note = 2-Prime-O-Methoxyethyl modified 5-methyl Uridine
  modified_base 25: mod_base = OTHER; note = DNA nucleotide carrying a 6-amino-5-nitro-3-yl-2(1H)-pyridone nucleobase
  modified_base order(22,28..29): mod_base = OTHER; note = 2-Prime-Fluoro modified nucleoside
  modified_base order(1..21,23,27,30..32): mod_base = OTHER; note = 2-Prime-O-Methyl modified nucleoside
  modified_base order(1^2,31^32): mod_base = OTHER; note = (1,3-dimethylimidazolidin-2-ylidene) Phosphoramidate linkage
  modified_base order(2..26,27..31): mod_base = OTHER; note = Phosphorothioate linkage
  modified_base 26^27: mod_base = OTHER; note = Methylphosphonate linkage
  misc_feature 1..32: note = RM114968

SEQ ID NO: 324 - DNA, 32 bp, synthetic construct; identical to SEQ ID NO: 75
  source 1..32: mol_type = other DNA
  misc_feature 22..23: note = DNA
  misc_feature order(1..21,24..32): note = RNA
  modified_base 21: mod_base = OTHER; note = 2-Prime-O-Methoxyethyl modified 5-methyl Uridine
  modified_base 22: mod_base = OTHER; note = DNA nucleotide carrying a 6-amino-5-nitro-3-yl-2(1H)-pyridone nucleobase
  modified_base order(19,25..26): mod_base = OTHER; note = 2-Prime-Fluoro modified nucleoside
  modified_base order(1..18,20,24,27..32): mod_base = OTHER; note = 2-Prime-O-Methyl modified nucleoside
  modified_base order(1^2,31^32): mod_base = OTHER; note = (1,3-dimethylimidazolidin-2-ylidene) Phosphoramidate linkage
  modified_base order(2..23,24..31): mod_base = OTHER; note = Phosphorothioate linkage
  modified_base 23^24: mod_base = OTHER; note = Methylphosphonate linkage
  misc_feature 1..32: note = RM114969

SEQ ID NO: 325 - DNA, 32 bp, synthetic construct; identical to SEQ ID NO: 76
  source 1..32: mol_type = other DNA
  misc_feature 19..20: note = DNA
  misc_feature order(1..18,21..32): note = RNA
  modified_base 18: mod_base = OTHER; note = 2-Prime-O-Methoxyethyl modified 5-methyl Uridine
  modified_base 19: mod_base = OTHER; note = DNA nucleotide carrying a 6-amino-5-nitro-3-yl-2(1H)-pyridone nucleobase
  modified_base order(16,22..23): mod_base = OTHER; note = 2-Prime-Fluoro modified nucleoside
  modified_base order(1..15,17,21,24..32): mod_base = OTHER; note = 2-Prime-O-Methyl modified nucleoside
  modified_base order(1^2,31^32): mod_base = OTHER; note = (1,3-dimethylimidazolidin-2-ylidene) Phosphoramidate linkage
  modified_base order(2..20,21..31): mod_base = OTHER; note = Phosphorothioate linkage
  modified_base 20^21: mod_base = OTHER; note = Methylphosphonate linkage
  misc_feature 1..32: note = RM114970

SEQ ID NO: 326 - DNA, 32 bp, synthetic construct; identical to SEQ ID NO: 77
  source 1..32: mol_type = other DNA
  misc_feature 16..17: note = DNA
  misc_feature order(1..15,18..32): note = RNA
  modified_base 15: mod_base = OTHER; note = 2-Prime-O-Methoxyethyl modified 5-methyl Uridine
  modified_base 16: mod_base = OTHER; note = DNA nucleotide carrying a 6-amino-5-nitro-3-yl-2(1H)-pyridone nucleobase
  modified_base order(13,19..20): mod_base = OTHER; note = 2-Prime-Fluoro modified nucleoside
  modified_base order(1..12,14,18,21..32): mod_base = OTHER; note = 2-Prime-O-Methyl modified nucleoside
  modified_base order(1^2,31^32): mod_base = OTHER; note = (1,3-dimethylimidazolidin-2-ylidene) Phosphoramidate linkage
  modified_base order(2..17,18..31): mod_base = OTHER; note = Phosphorothioate linkage
  modified_base 17^18: mod_base = OTHER; note = Methylphosphonate linkage
  misc_feature 1..32: note = RM114971

SEQ ID NO: 327 - DNA, 32 bp, synthetic construct; identical to SEQ ID NO: 78
  source 1..32: mol_type = other DNA
  misc_feature 13..14: note = DNA
  misc_feature order(1..12,15..32): note = RNA
  modified_base 12: mod_base = OTHER; note = 2-Prime-O-Methoxyethyl modified 5-methyl Uridine
  modified_base 13: mod_base = OTHER; note = DNA nucleotide carrying a 6-amino-5-nitro-3-yl-2(1H)-pyridone nucleobase
  modified_base order(10,16..17): mod_base = OTHER; note = 2-Prime-Fluoro modified nucleoside
  modified_base order(1..9,11,15,18..32): mod_base = OTHER; note = 2-Prime-O-Methyl modified nucleoside
  modified_base order(1^2,31^32): mod_base = OTHER; note = (1,3-dimethylimidazolidin-2-ylidene) Phosphoramidate linkage
  modified_base order(2..14,15..31): mod_base = OTHER; note = Phosphorothioate linkage
  modified_base 14^15: mod_base = OTHER; note = Methylphosphonate linkage
  misc_feature 1..32: note = RM114972

SEQ ID NO: 328 - DNA, 32 bp, synthetic construct; identical to SEQ ID NO: 79
  source 1..32: mol_type = other DNA
  misc_feature 10..11: note = DNA
  misc_feature order(1..9,12..32): note = RNA
  modified_base 9: mod_base = OTHER; note = 2-Prime-O-Methoxyethyl modified 5-methyl Uridine
  modified_base 10: mod_base = OTHER; note = DNA nucleotide carrying a 6-amino-5-nitro-3-yl-2(1H)-pyridone nucleobase
  modified_base order(7,13..14): mod_base = OTHER; note = 2-Prime-Fluoro modified nucleoside
  modified_base order(1..6,8,12,15..32): mod_base = OTHER; note = 2-Prime-O-Methyl modified nucleoside
  modified_base order(1^2,31^32): mod_base = OTHER; note = (1,3-dimethylimidazolidin-2-ylidene) Phosphoramidate linkage
  modified_base order(2..11,12..31): mod_base = OTHER; note = Phosphorothioate linkage
  modified_base 11^12: mod_base = OTHER; note = Methylphosphonate linkage
  misc_feature 1..32: note = RM114973

SEQ ID NO: 329 - DNA, 32 bp, synthetic construct; identical to SEQ ID NO: 80
  source 1..32: mol_type = other DNA
  misc_feature 7..8: note = DNA
  misc_feature order(1..6,9..32): note = RNA
  modified_base 6: mod_base = OTHER; note = 2-Prime-O-Methoxyethyl modified 5-methyl Uridine
  modified_base 7: mod_base = OTHER; note = DNA nucleotide carrying a 6-amino-5-nitro-3-yl-2(1H)-pyridone nucleobase
  modified_base order(4,10..11): mod_base = OTHER; note = 2-Prime-Fluoro modified nucleoside
  modified_base order(1..3,5,9,12..32): mod_base = OTHER; note = 2-Prime-O-Methyl modified nucleoside
  modified_base order(1^2,31^32): mod_base = OTHER; note = (1,3-dimethylimidazolidin-2-ylidene) Phosphoramidate linkage
  modified_base order(2..8,9..31): mod_base = OTHER; note = Phosphorothioate linkage
  modified_base 8^9: mod_base = OTHER; note = Methylphosphonate linkage
  misc_feature 1..32: note = RM114974

SEQ ID NO: 330 - DNA, 32 bp, synthetic construct; identical to SEQ ID NO: 74
  source 1..32: mol_type = other DNA
  misc_feature 25..26: note = DNA
  misc_feature order(1..24,27..32): note = RNA
  modified_base 24: mod_base = OTHER; note = 2-Prime-O-Methoxyethyl modified 5-methyl Uridine
  modified_base 25: mod_base = OTHER; note = DNA nucleotide carrying a 6-amino-5-nitro-3-yl-2(1H)-pyridone nucleobase
  modified_base order(23,28,30): mod_base = OTHER; note = 2-Prime-Fluoro modified nucleoside
  modified_base order(1..22,27,29,31..32): mod_base = OTHER; note = 2-Prime-O-Methyl modified nucleoside
  modified_base order(1^2,31^32): mod_base = OTHER; note = (1,3-dimethylimidazolidin-2-ylidene) Phosphoramidate linkage
  modified_base order(2..26,27..31): mod_base = OTHER; note = Phosphorothioate linkage
  modified_base 26^27: mod_base = OTHER; note = Methylphosphonate linkage
  misc_feature 1..32: note = RM114975

SEQ ID NO: 331 - DNA, 32 bp, synthetic construct; identical to SEQ ID NO: 75
  source 1..32: mol_type = other DNA
  misc_feature 22..23: note = DNA
  misc_feature order(1..21,24..32): note = RNA
  modified_base 21: mod_base = OTHER; note = 2-Prime-O-Methoxyethyl modified 5-methyl Uridine
  modified_base 22: mod_base = OTHER; note = DNA nucleotide carrying a 6-amino-5-nitro-3-yl-2(1H)-pyridone nucleobase
  modified_base order(20,25,27): mod_base = OTHER; note = 2-Prime-Fluoro modified nucleoside
  modified_base order(1..19,24,26,28..32): mod_base = OTHER; note = 2-Prime-O-Methyl modified nucleoside
  modified_base order(1^2,31^32): mod_base = OTHER; note = (1,3-dimethylimidazolidin-2-ylidene) Phosphoramidate linkage
  modified_base order(2..23,24..31): mod_base = OTHER; note = Phosphorothioate linkage
  modified_base 23^24: mod_base = OTHER; note = Methylphosphonate linkage
  misc_feature 1..32: note = RM114976

SEQ ID NO: 332 - DNA, 32 bp, synthetic construct; identical to SEQ ID NO: 76
  source 1..32: mol_type = other DNA
  misc_feature 19..20: note = DNA
  misc_feature order(1..18,21..32): note = RNA
  modified_base 18: mod_base = OTHER; note = 2-Prime-O-Methoxyethyl modified 5-methyl Uridine
  modified_base 19: mod_base = OTHER; note = DNA nucleotide carrying a 6-amino-5-nitro-3-yl-2(1H)-pyridone nucleobase
  modified_base order(17,22,24): mod_base = OTHER; note = 2-Prime-Fluoro modified nucleoside
  modified_base order(1..16,21,23,25..32): mod_base = OTHER; note = 2-Prime-O-Methyl modified nucleoside
  modified_base order(1^2,31^32): mod_base = OTHER; note = (1,3-dimethylimidazolidin-2-ylidene) Phosphoramidate linkage
  modified_base order(2..20,21..31): mod_base = OTHER; note = Phosphorothioate linkage
  modified_base 20^21: mod_base = OTHER; note = Methylphosphonate linkage
  misc_feature 1..32: note = RM114977

SEQ ID NO: 333 - DNA, 32 bp, synthetic construct; identical to SEQ ID NO: 77
  source 1..32: mol_type = other DNA
  misc_feature 16..17: note = DNA
  misc_feature order(1..15,18..32): note = RNA
  modified_base 15: mod_base = OTHER; note = 2-Prime-O-Methoxyethyl modified 5-methyl Uridine
  modified_base 16: mod_base = OTHER; note = DNA nucleotide carrying a 6-amino-5-nitro-3-yl-2(1H)-pyridone nucleobase
  modified_base order(14,19,21): mod_base = OTHER; note = 2-Prime-Fluoro modified nucleoside
  modified_base order(1..13,18,20,22..32): mod_base = OTHER; note = 2-Prime-O-Methyl modified nucleoside
  modified_base order(1^2,31^32): mod_base = OTHER; note = (1,3-dimethylimidazolidin-2-ylidene) Phosphoramidate linkage
  modified_base order(2..17,18..31): mod_base = OTHER; note = Phosphorothioate linkage
  modified_base 17^18: mod_base = OTHER; note = Methylphosphonate linkage
  misc_feature 1..32: note = RM114978

SEQ ID NO: 334 - DNA, 32 bp, synthetic construct; identical to SEQ ID NO: 78
  source 1..32: mol_type = other DNA
  misc_feature 13..14: note = DNA
  misc_feature order(1..12,15..32): note = RNA
  modified_base 12: mod_base = OTHER; note = 2-Prime-O-Methoxyethyl modified 5-methyl Uridine
  modified_base 13: mod_base = OTHER; note = DNA nucleotide carrying a 6-amino-5-nitro-3-yl-2(1H)-pyridone nucleobase
  modified_base order(11,16,18): mod_base = OTHER; note = 2-Prime-Fluoro modified nucleoside
  modified_base order(1..10,15,17,19..32): mod_base = OTHER; note = 2-Prime-O-Methyl modified nucleoside
  modified_base order(1^2,31^32): mod_base = OTHER; note = (1,3-dimethylimidazolidin-2-ylidene) Phosphoramidate linkage
  modified_base order(2..14,15..31): mod_base = OTHER; note = Phosphorothioate linkage
  modified_base 14^15: mod_base = OTHER; note = Methylphosphonate linkage
  misc_feature 1..32: note = RM114979

SEQ ID NO: 335 - DNA, 32 bp, synthetic construct; identical to SEQ ID NO: 79
  source 1..32: mol_type = other DNA
  misc_feature 10..11: note = DNA
  misc_feature order(1..9,12..32): note = RNA
  modified_base 9: mod_base = OTHER; note = 2-Prime-O-Methoxyethyl modified 5-methyl Uridine
  modified_base 10: mod_base = OTHER; note = DNA nucleotide carrying a 6-amino-5-nitro-3-yl-2(1H)-pyridone nucleobase
  modified_base order(8,13,15): mod_base = OTHER; note = 2-Prime-Fluoro modified nucleoside
  modified_base order(1..7,12,14,16..32): mod_base = OTHER; note = 2-Prime-O-Methyl modified nucleoside
  modified_base order(1^2,31^32): mod_base = OTHER; note = (1,3-dimethylimidazolidin-2-ylidene) Phosphoramidate linkage
  modified_base order(2..11,12..31): mod_base = OTHER; note = Phosphorothioate linkage
  modified_base 11^12: mod_base = OTHER; note = Methylphosphonate linkage
  misc_feature 1..32: note = RM114980

SEQ ID NO: 336 - DNA, 32 bp, synthetic construct; identical to SEQ ID NO: 80
  source 1..32: mol_type = other DNA
  misc_feature 7..8: note = DNA
  misc_feature order(1..6,9..32): note = RNA
  modified_base 6: mod_base = OTHER; note = 2-Prime-O-Methoxyethyl modified 5-methyl Uridine
  modified_base 7: mod_base = OTHER; note = DNA nucleotide carrying a 6-amino-5-nitro-3-yl-2(1H)-pyridone nucleobase
  modified_base order(5,10,12): mod_base = OTHER; note = 2-Prime-Fluoro modified nucleoside
  modified_base order(1..4,9,11,13..32): mod_base = OTHER; note = 2-Prime-O-Methyl modified nucleoside
  modified_base order(1^2,31^32): mod_base = OTHER; note = (1,3-dimethylimidazolidin-2-ylidene) Phosphoramidate linkage
  modified_base order(2..8,9..31): mod_base = OTHER; note = Phosphorothioate linkage
  modified_base 8^9: mod_base = OTHER; note = Methylphosphonate linkage
  misc_feature 1..32: note = RM114981

SEQ ID NO: 337 - DNA, 32 bp, synthetic construct; identical to SEQ ID NO: 80
  source 1..32: mol_type = other DNA
  misc_feature 7..8: note = DNA
  misc_feature order(1..6,9..32): note = RNA
  modified_base 6: mod_base = OTHER; note = 2-Prime-O-Methoxyethyl modified 5-methyl Uridine
  modified_base 7: mod_base = OTHER; note = DNA nucleotide carrying a 6-amino-5-nitro-3-yl-2(1H)-pyridone nucleobase
  modified_base order(1,3,10,12,17..18,21,26,30): mod_base = OTHER; note = 2-Prime-Fluoro modified nucleoside
  modified_base order(2,4..5,9,11,13..16,19..20,22..25,27..29,31..32): mod_base = OTHER; note = 2-Prime-O-Methyl modified nucleoside
  modified_base order(1^2,31^32): mod_base = OTHER; note = (1,3-dimethylimidazolidin-2-ylidene) Phosphoramidate linkage
  modified_base order(2..8,9..31): mod_base = OTHER; note = Phosphorothioate linkage
  modified_base 8^9: mod_base = OTHER; note = Methylphosphonate linkage
  misc_feature 1..32: note = RM114982

SEQ ID NO: 338 - DNA, 32 bp, synthetic construct; identical to SEQ ID NO: 75
  source 1..32: mol_type = other DNA
  misc_feature 22..23: note = DNA
  misc_feature order(1..21,24..32): note = RNA
  modified_base 21: mod_base = OTHER; note = 2-Prime-O-Methoxyethyl modified 5-methyl Uridine
  modified_base 22: mod_base = OTHER; note = DNA nucleotide carrying a 6-amino-5-nitro-3-yl-2(1H)-pyridone nucleobase
  modified_base order(1,5,10,13..14,19,25,28,30): mod_base = OTHER; note = 2-Prime-Fluoro modified nucleoside
  modified_base order(2..4,6..9,11..12,15..18,20,24,26..27,29,31..32): mod_base = OTHER; note = 2-Prime-O-Methyl modified nucleoside
  modified_base order(1^2,31^32): mod_base = OTHER; note = (1,3-dimethylimidazolidin-2-ylidene) Phosphoramidate linkage
  modified_base order(2..23,24..31): mod_base = OTHER; note = Phosphorothioate linkage
  modified_base 23^24: mod_base = OTHER; note = Methylphosphonate linkage
  misc_feature 1..32: note = RM114983

SEQ ID NO: 339 - DNA, 23 bp, synthetic construct
  source 1..23: mol_type = other DNA
  misc_feature 12..13: note = DNA
  misc_feature order(1..11,14..23): note = RNA
  modified_base 11: mod_base = OTHER; note = 2-Prime-O-Methoxyethyl modified 5-methyl Uridine
  modified_base 12: mod_base = OTHER; note = DNA nucleotide carrying a 6-amino-5-nitro-3-yl-2(1H)-pyridone nucleobase
  modified_base order(6,8,15,17,22..23): mod_base = OTHER; note = 2-Prime-Fluoro modified nucleoside
  modified_base order(1..5,7,9..10,14,16,18..21): mod_base = OTHER; note = 2-Prime-O-Methyl modified nucleoside
  modified_base order(1^2,22^23): mod_base = OTHER; note = (1,3-dimethylimidazolidin-2-ylidene) Phosphoramidate linkage
  modified_base order(2..13,14..22): mod_base = OTHER; note = Phosphorothioate linkage
  modified_base 13^14: mod_base = OTHER; note = Methylphosphonate linkage
  misc_feature 1..23: note = RM114984
gcccttcgtctnatggacaaagt

SEQ ID NO: 340 - DNA, 23 bp, synthetic construct
  source 1..23: mol_type = other DNA
  misc_feature 9..10: note = DNA
  misc_feature order(1..8,11..23): note = RNA
  modified_base 8: mod_base = OTHER; note = 2-Prime-O-Methoxyethyl modified 5-methyl Uridine
  modified_base 9: mod_base = OTHER; note = DNA nucleotide carrying a 6-amino-5-nitro-3-yl-2(1H)-pyridone nucleobase
  modified_base order(3,5,12,14,19..20): mod_base = OTHER; note = 2-Prime-Fluoro modified nucleoside
  modified_base order(1..2,4,6..7,11,13,15..18,21..23): mod_base = OTHER; note = 2-Prime-O-Methyl modified nucleoside
  modified_base order(1^2,22^23): mod_base = OTHER; note = (1,3-dimethylimidazolidin-2-ylidene) Phosphoramidate linkage
  modified_base order(2..10,11..22): mod_base = OTHER; note = Phosphorothioate linkage
  modified_base 10^11: mod_base = OTHER; note = Methylphosphonate linkage
  misc_feature 1..23: note = RM114985
cttcgtctnatggacaaagtctt

SEQ ID NO: 341 - DNA, 32 bp, synthetic construct; identical to SEQ ID NO: 76
  source 1..32: mol_type = other DNA
  misc_feature 19..20: note = DNA
  misc_feature order(1..18,21..32): note = RNA
  modified_base 18: mod_base = OTHER; note = 2-Prime-O-Methoxyethyl modified 5-methyl Uridine
  modified_base 19: mod_base = OTHER; note = DNA nucleotide carrying a 6-amino-5-nitro-3-yl-2(1H)-pyridone nucleobase
  modified_base order(13,15,22,24,29..30): mod_base = OTHER; note = 2-Prime-Fluoro modified nucleoside
  modified_base order(1..12,14,16..17,21,23,25..28,31..32): mod_base = OTHER; note = 2-Prime-O-Methyl modified nucleoside
  modified_base order(1^2,31^32): mod_base = OTHER; note = (1,3-dimethylimidazolidin-2-ylidene) Phosphoramidate linkage
  modified_base order(2..20,21..31): mod_base = OTHER; note = Phosphorothioate linkage
  modified_base 20^21: mod_base = OTHER; note = Methylphosphonate linkage
  misc_feature 1..32: note = RM114986

SEQ ID NO: 342 - DNA, 32 bp, synthetic construct; identical to SEQ ID NO: 77
  source 1..32: mol_type = other DNA
  misc_feature 16..17: note = DNA
  misc_feature order(1..15,18..32): note = RNA
  modified_base 15: mod_base = OTHER; note = 2-Prime-O-Methoxyethyl modified 5-methyl Uridine
  modified_base 16: mod_base = OTHER; note = DNA nucleotide carrying a 6-amino-5-nitro-3-yl-2(1H)-pyridone nucleobase
  modified_base order(10,12,19,21,26..27): mod_base = OTHER; note = 2-Prime-Fluoro modified nucleoside
  modified_base order(1..9,11,13..14,18,20,22..25,28..32): mod_base = OTHER; note = 2-Prime-O-Methyl modified nucleoside
  modified_base order(1^2,31^32): mod_base = OTHER; note = (1,3-dimethylimidazolidin-2-ylidene) Phosphoramidate linkage
  modified_base order(2..17,18..31): mod_base = OTHER; note = Phosphorothioate linkage
  modified_base 17^18: mod_base = OTHER; note = Methylphosphonate linkage
  misc_feature 1..32: note = RM114987

SEQ ID NO: 343 - DNA, 32 bp, synthetic construct; identical to SEQ ID NO: 78
  source 1..32: mol_type = other DNA
  misc_feature 13..14: note = DNA
  misc_feature order(1..12,15..32): note = RNA
  modified_base 12: mod_base = OTHER; note = 2-Prime-O-Methoxyethyl modified 5-methyl Uridine
  modified_base 13: mod_base = OTHER; note = DNA nucleotide carrying a 6-amino-5-nitro-3-yl-2(1H)-pyridone nucleobase
  modified_base order(7,9,16,18,23..24): mod_base = OTHER; note = 2-Prime-Fluoro modified nucleoside
  modified_base order(1..6,8,10..11,15,17,19..22,25..32): mod_base = OTHER; note = 2-Prime-O-Methyl modified nucleoside
  modified_base order(1^2,31^32): mod_base = OTHER; note = (1,3-dimethylimidazolidin-2-ylidene) Phosphoramidate linkage
  modified_base order(2..14,15..31): mod_base = OTHER; note = Phosphorothioate linkage
  modified_base 14^15: mod_base = OTHER; note = Methylphosphonate linkage
  misc_feature 1..32: note = RM114988

SEQ ID NO: 344 - DNA, 32 bp, synthetic construct; identical to SEQ ID NO: 79
  source 1..32: mol_type = other DNA
  misc_feature 10..11: note = DNA
  misc_feature order(1..9,12..32): note = RNA
  modified_base 9: mod_base = OTHER; note = 2-Prime-O-Methoxyethyl modified 5-methyl Uridine
  modified_base 10: mod_base = OTHER; note = DNA nucleotide carrying a 6-amino-5-nitro-3-yl-2(1H)-pyridone nucleobase
  modified_base order(4,6,13,15,20..21): mod_base = OTHER; note = 2-Prime-Fluoro modified nucleoside
  modified_base order(1..3,5,7..8,12,14,16..19,22..32): mod_base = OTHER; note = 2-Prime-O-Methyl modified nucleoside
  modified_base order(1^2,31^32): mod_base = OTHER; note = (1,3-dimethylimidazolidin-2-ylidene) Phosphoramidate linkage
  modified_base order(2..11,12..31): mod_base = OTHER; note = Phosphorothioate linkage
  modified_base 11^12: mod_base = OTHER; note = Methylphosphonate linkage
  misc_feature 1..32: note = RM114989

SEQ ID NO: 345 - DNA, 32 bp, synthetic construct; identical to SEQ ID NO: 80
  source 1..32: mol_type = other DNA
  misc_feature 7..8: note = DNA
  misc_feature order(1..6,9..32): note = RNA
  modified_base 6: mod_base = OTHER; note = 2-Prime-O-Methoxyethyl modified 5-methyl Uridine
  modified_base 7: mod_base = OTHER; note = DNA nucleotide carrying a 6-amino-5-nitro-3-yl-2(1H)-pyridone nucleobase
  modified_base order(1,3,10,12,17..18): mod_base = OTHER; note = 2-Prime-Fluoro modified nucleoside
  modified_base order(2,4..5,9,11,13..16,19..32): mod_base = OTHER; note = 2-Prime-O-Methyl modified nucleoside
  modified_base order(1^2,31^32): mod_base = OTHER; note = (1,3-dimethylimidazolidin-2-ylidene) Phosphoramidate linkage
  modified_base order(2..8,9..31): mod_base = OTHER; note = Phosphorothioate linkage
  modified_base 8^9: mod_base = OTHER; note = Methylphosphonate linkage
  misc_feature 1..32: note = RM114990

SEQ ID NO: 346 - DNA, 23 bp, synthetic construct
  source 1..23: mol_type = other DNA
  misc_feature 15..16: note = DNA
  misc_feature order(1..14,17..23): note = RNA
  modified_base 14: mod_base = OTHER; note = 2-Prime-O-Methoxyethyl modified 5-methyl Uridine
  modified_base 15: mod_base = OTHER; note = DNA nucleotide carrying a 6-amino-5-nitro-3-yl-2(1H)-pyridone nucleobase
  modified_base order(6..7,12,18,21,23): mod_base = OTHER; note = 2-Prime-Fluoro modified nucleoside
  modified_base order(1..5,8..11,13,17,19..20,22): mod_base = OTHER; note = 2-Prime-O-Methyl modified nucleoside
  modified_base order(1^2,22^23): mod_base = OTHER; note = (1,3-dimethylimidazolidin-2-ylidene) Phosphoramidate linkage
  modified_base order(2..16,17..22): mod_base = OTHER; note = Phosphorothioate linkage
  modified_base 16^17: mod_base = OTHER; note = Methylphosphonate linkage
  misc_feature 1..23: note = RM114991
ttggcccttcgtctnatggacaa

SEQ ID NO: 347 - DNA, 23 bp, synthetic construct
  source 1..23: mol_type = other DNA
  misc_feature 12..13: note = DNA
  misc_feature order(1..11,14..23): note = RNA
  modified_base 11: mod_base = OTHER; note = 2-Prime-O-Methoxyethyl modified 5-methyl Uridine
  modified_base 12: mod_base = OTHER; note = DNA nucleotide carrying a 6-amino-5-nitro-3-yl-2(1H)-pyridone nucleobase
  modified_base order(3..4,9,15,18,20): mod_base = OTHER; note = 2-Prime-Fluoro modified nucleoside
  modified_base order(1..2,5..8,10,14,16..17,19,21..23): mod_base = OTHER; note = 2-Prime-O-Methyl modified nucleoside
  modified_base order(1^2,22^23): mod_base = OTHER; note = (1,3-dimethylimidazolidin-2-ylidene) Phosphoramidate linkage
  modified_base order(2..13,14..22): mod_base = OTHER; note = Phosphorothioate linkage
  modified_base 13^14: mod_base = OTHER; note = Methylphosphonate linkage
  misc_feature 1..23: note = RM114992
gcccttcgtctnatggacaaagt

SEQ ID NO: 348 - DNA, 32 bp, synthetic construct; identical to SEQ ID NO: 75
  source 1..32: mol_type = other DNA
  misc_feature 22..23: note = DNA
  misc_feature order(1..21,24..32): note = RNA
  modified_base 21: mod_base = OTHER; note = 2-Prime-O-Methoxyethyl modified 5-methyl Uridine
  modified_base 22: mod_base = OTHER; note = DNA nucleotide carrying a 6-amino-5-nitro-3-yl-2(1H)-pyridone nucleobase
  modified_base order(13..14,19,25,28,30): mod_base = OTHER; note = 2-Prime-Fluoro modified nucleoside
  modified_base order(1..12,15..18,20,24,26..27,29,31..32): mod_base = OTHER; note = 2-Prime-O-Methyl modified nucleoside
  modified_base order(1^2,31^32): mod_base = OTHER; note = (1,3-dimethylimidazolidin-2-ylidene) Phosphoramidate linkage
  modified_base order(2..23,24..31): mod_base = OTHER; note = Phosphorothioate linkage
  modified_base 23^24: mod_base = OTHER; note = Methylphosphonate linkage
  misc_feature 1..32: note = RM114993

SEQ ID NO: 349 - DNA, 32 bp, synthetic construct; identical to SEQ ID NO: 76
  source 1..32: mol_type = other DNA
  misc_feature 19..20: note = DNA
  misc_feature order(1..18,21..32): note = RNA
  modified_base 18: mod_base = OTHER; note = 2-Prime-O-Methoxyethyl modified 5-methyl Uridine
  modified_base 19: mod_base = OTHER; note = DNA nucleotide carrying a 6-amino-5-nitro-3-yl-2(1H)-pyridone nucleobase
  modified_base order(10..11,16,22,25,27): mod_base = OTHER; note = 2-Prime-Fluoro modified nucleoside
  modified_base order(1..9,12..15,17,21,23..24,26,28..32): mod_base = OTHER; note = 2-Prime-O-Methyl modified nucleoside
  modified_base order(1^2,31^32): mod_base = OTHER; note = (1,3-dimethylimidazolidin-2-ylidene) Phosphoramidate linkage
  modified_base order(2..20,21..31): mod_base = OTHER; note = Phosphorothioate linkage
  modified_base 20^21: mod_base = OTHER; note = Methylphosphonate linkage
  misc_feature 1..32: note = RM114994

SEQ ID NO: 350 - DNA, 32 bp, synthetic construct; identical to SEQ ID NO: 77
  source 1..32: mol_type = other DNA
  misc_feature 16..17: note = DNA
  misc_feature order(1..15,18..32): note = RNA
  modified_base 15: mod_base = OTHER; note = 2-Prime-O-Methoxyethyl modified 5-methyl Uridine
  modified_base 16: mod_base = OTHER; note = DNA nucleotide carrying a 6-amino-5-nitro-3-yl-2(1H)-pyridone nucleobase
  modified_base order(7..8,13,19,22,24): mod_base = OTHER; note = 2-Prime-Fluoro modified nucleoside
  modified_base order(1..6,9..12,14,18,20..21,23,25..32): mod_base = OTHER; note = 2-Prime-O-Methyl modified nucleoside
  modified_base order(1^2,31^32): mod_base = OTHER; note = (1,3-dimethylimidazolidin-2-ylidene) Phosphoramidate linkage
  modified_base order(2..17,18..31): mod_base = OTHER; note = Phosphorothioate linkage
  modified_base 17^18: mod_base = OTHER; note = Methylphosphonate linkage
  misc_feature 1..32: note = RM114995

SEQ ID NO: 351 - DNA, 32 bp, synthetic construct; identical to SEQ ID NO: 78
  source 1..32: mol_type = other DNA
  misc_feature 13..14: note = DNA
  misc_feature order(1..12,15..32): note = RNA
  modified_base 12: mod_base = OTHER; note = 2-Prime-O-Methoxyethyl modified 5-methyl Uridine
  modified_base 13: mod_base = OTHER; note = DNA nucleotide carrying a 6-amino-5-nitro-3-yl-2(1H)-pyridone nucleobase
  modified_base order(4..5,10,16,19,21): mod_base = OTHER; note = 2-Prime-Fluoro modified nucleoside
  modified_base order(1..3,6..9,11,15,17..18,20,22..32): mod_base = OTHER; note = 2-Prime-O-Methyl modified nucleoside
  modified_base order(1^2,31^32): mod_base = OTHER; note = (1,3-dimethylimidazolidin-2-ylidene) Phosphoramidate linkage
  modified_base order(2..14,15..31): mod_base = OTHER; note = Phosphorothioate linkage
  modified_base 14^15: mod_base = OTHER; note = Methylphosphonate linkage
  misc_feature 1..32: note = RM114996

SEQ ID NO: 352 - DNA, 32 bp, synthetic construct; identical to SEQ ID NO: 79
  source 1..32: mol_type = other DNA
  misc_feature 10..11: note = DNA
  misc_feature order(1..9,12..32): note = RNA
  modified_base 9: mod_base = OTHER; note = 2-Prime-O-Methoxyethyl modified 5-methyl Uridine
  modified_base 10: mod_base = OTHER; note = DNA nucleotide carrying a 6-amino-5-nitro-3-yl-2(1H)-pyridone nucleobase
  modified_base order(1..2,7,13,16,18): mod_base = OTHER; note = 2-Prime-Fluoro modified nucleoside
  modified_base order(3..6,8,12,14..15,17,19..32): mod_base = OTHER; note = 2-Prime-O-Methyl modified nucleoside
  modified_base order(1^2,31^32): mod_base = OTHER; note = (1,3-dimethylimidazolidin-2-ylidene) Phosphoramidate linkage
  modified_base order(2..11,12..31): mod_base = OTHER; note = Phosphorothioate linkage
  modified_base 11^12: mod_base = OTHER; note = Methylphosphonate linkage
  misc_feature 1..32: note = RM114997

SEQ ID NO: 353 - DNA, 32 bp, synthetic construct; identical to SEQ ID NO: 73
  source 1..32: mol_type = other DNA
  misc_feature 28..29: note = DNA
  misc_feature order(1..27,30..32): note = RNA
  modified_base 27: mod_base = OTHER; note = 2-Prime-O-Methoxyethyl modified 5-methyl Uridine
  modified_base 28: mod_base = OTHER; note = DNA nucleotide carrying a 6-amino-5-nitro-3-yl-2(1H)-pyridone nucleobase
  modified_base order(22,24,31): mod_base = OTHER; note = 2-Prime-Fluoro modified nucleoside
  modified_base order(1..21,23,25..26,30,32): mod_base = OTHER; note = 2-Prime-O-Methyl modified nucleoside
  modified_base order(1^2,31^32): mod_base = OTHER; note = (1,3-dimethylimidazolidin-2-ylidene) Phosphoramidate linkage
  modified_base order(2..29,30^31): mod_base = OTHER; note = Phosphorothioate linkage
  modified_base 29^30: mod_base = OTHER; note = Methylphosphonate linkage
  misc_feature 1..32: note = RM114998

SEQ ID NO: 354 - DNA, 32 bp, synthetic construct; identical to SEQ ID NO: 74
  source 1..32: mol_type = other DNA
  misc_feature 25..26: note = DNA
  misc_feature order(1..24,27..32): note = RNA
  modified_base 24: mod_base = OTHER; note = 2-Prime-O-Methoxyethyl modified 5-methyl Uridine
  modified_base 25: mod_base = OTHER; note = DNA nucleotide carrying a 6-amino-5-nitro-3-yl-2(1H)-pyridone nucleobase
  modified_base order(19,21,28): mod_base = OTHER; note = 2-Prime-Fluoro modified nucleoside
  modified_base order(1..18,20,22..23,27,29..32): mod_base = OTHER; note = 2-Prime-O-Methyl modified nucleoside
  modified_base order(1^2,31^32): mod_base = OTHER; note = (1,3-dimethylimidazolidin-2-ylidene) Phosphoramidate linkage
  modified_base order(2..26,27..31): mod_base = OTHER; note = Phosphorothioate linkage
  modified_base 26^27: mod_base = OTHER; note = Methylphosphonate linkage
  misc_feature 1..32: note = RM114999

SEQ ID NO: 355 - DNA, 32 bp, synthetic construct; identical to SEQ ID NO: 75
  source 1..32: mol_type = other DNA
  misc_feature 22..23: note = DNA
  misc_feature order(1..21,24..32): note = RNA
  modified_base 21: mod_base = OTHER; note = 2-Prime-O-Methoxyethyl modified 5-methyl Uridine
  modified_base 22: mod_base = OTHER; note = DNA nucleotide carrying a 6-amino-5-nitro-3-yl-2(1H)-pyridone nucleobase
  modified_base order(16,18,25): mod_base = OTHER; note = 2-Prime-Fluoro modified nucleoside
  modified_base order(1..15,17,19..20,24,26..32): mod_base = OTHER; note = 2-Prime-O-Methyl modified nucleoside
  modified_base order(1^2,31^32): mod_base = OTHER; note = (1,3-dimethylimidazolidin-2-ylidene) Phosphoramidate linkage
  modified_base order(2..23,24..31): mod_base = OTHER; note = Phosphorothioate linkage
  modified_base 23^24: mod_base = OTHER; note = Methylphosphonate linkage
  misc_feature 1..32: note = RM115000

SEQ ID NO: 356 - DNA, 32 bp, synthetic construct; identical to SEQ ID NO: 76
  source 1..32: mol_type = other DNA
  misc_feature 19..20: note = DNA
  misc_feature order(1..18,21..32): note = RNA
  modified_base 18: mod_base = OTHER; note = 2-Prime-O-Methoxyethyl modified 5-methyl Uridine
  modified_base 19: mod_base = OTHER; note = DNA nucleotide carrying a 6-amino-5-nitro-3-yl-2(1H)-pyridone nucleobase
  modified_base order(13,15,22): mod_base = OTHER; note = 2-Prime-Fluoro modified nucleoside
  modified_base order(1..12,14,16..17,21,23..32): mod_base = OTHER; note = 2-Prime-O-Methyl modified nucleoside
  modified_base order(1^2,31^32): mod_base = OTHER; note = (1,3-dimethylimidazolidin-2-ylidene) Phosphoramidate linkage
  modified_base order(2..20,21..31): mod_base = OTHER; note = Phosphorothioate linkage
  modified_base 20^21: mod_base = OTHER; note = Methylphosphonate linkage
  misc_feature 1..32: note = RM115001

SEQ ID NO: 357 - DNA, 32 bp, synthetic construct; identical to SEQ ID NO: 77
  source 1..32: mol_type = other DNA
  misc_feature 16..17: note = DNA
  misc_feature order(1..15,18..32): note = RNA
  modified_base 15: mod_base = OTHER; note = 2-Prime-O-Methoxyethyl modified 5-methyl Uridine
  modified_base 16: mod_base = OTHER; note = DNA nucleotide carrying a 6-amino-5-nitro-3-yl-2(1H)-pyridone nucleobase
  modified_base order(10,12,19): mod_base = OTHER; note = 2-Prime-Fluoro modified nucleoside
  modified_base order(1..9,11,13..14,18,20..32): mod_base = OTHER; note = 2-Prime-O-Methyl modified nucleoside
  modified_base order(1^2,31^32): mod_base = OTHER; note = (1,3-dimethylimidazolidin-2-ylidene) Phosphoramidate linkage
  modified_base order(2..17,18..31): mod_base = OTHER; note = Phosphorothioate linkage
  modified_base 17^18: mod_base = OTHER; note = Methylphosphonate linkage
  misc_feature 1..32: note = RM115002

SEQ ID NO: 358 - DNA, 32 bp, synthetic construct; identical to SEQ ID NO: 78
  source 1..32: mol_type = other DNA
  misc_feature 13..14: note = DNA
  misc_feature order(1..12,15..32): note = RNA
  modified_base 12: mod_base = OTHER; note = 2-Prime-O-Methoxyethyl modified 5-methyl Uridine
  modified_base 13: mod_base = OTHER; note = DNA nucleotide carrying a 6-amino-5-nitro-3-yl-2(1H)-pyridone nucleobase
  modified_base order(7,9,16): mod_base = OTHER; note = 2-Prime-Fluoro modified nucleoside
  modified_base order(1..6,8,10..11,15,17..32): mod_base = OTHER; note = 2-Prime-O-Methyl modified nucleoside
  modified_base order(1^2,31^32): mod_base = OTHER; note = (1,3-dimethylimidazolidin-2-ylidene) Phosphoramidate linkage
  modified_base order(2..14,15..31): mod_base = OTHER; note = Phosphorothioate linkage
  modified_base 14^15: mod_base = OTHER; note = Methylphosphonate linkage
  misc_feature 1..32: note = RM115003

SEQ ID NO: 359 - DNA, 32 bp, synthetic construct; identical to SEQ ID NO: 79
  source 1..32: mol_type = other DNA
  misc_feature 10..11: note = DNA
  misc_feature order(1..9,12..32): note = RNA
  modified_base 9: mod_base = OTHER; note = 2-Prime-O-Methoxyethyl modified 5-methyl Uridine
  modified_base 10: mod_base = OTHER; note = DNA nucleotide carrying a 6-amino-5-nitro-3-yl-2(1H)-pyridone nucleobase
  modified_base order(4,6,13): mod_base = OTHER; note = 2-Prime-Fluoro modified nucleoside
  modified_base order(1..3,5,7..8,12,14..32): mod_base = OTHER; note = 2-Prime-O-Methyl modified nucleoside
  modified_base order(1^2,31^32): mod_base = OTHER; note = (1,3-dimethylimidazolidin-2-ylidene) Phosphoramidate linkage
  modified_base order(2..11,12..31): mod_base = OTHER; note = Phosphorothioate linkage
  modified_base 11^12: mod_base = OTHER; note = Methylphosphonate linkage
  misc_feature 1..32: note = RM115004

SEQ ID NO: 360 - DNA, 32 bp, synthetic construct; identical to SEQ ID NO: 80
  source 1..32: mol_type = other DNA
  misc_feature 7..8: note = DNA
  misc_feature order(1..6,9..32): note = RNA
  modified_base 6: mod_base = OTHER; note = 2-Prime-O-Methoxyethyl modified 5-methyl Uridine
  modified_base 7: mod_base = OTHER; note = DNA nucleotide carrying a 6-amino-5-nitro-3-yl-2(1H)-pyridone nucleobase
  modified_base order(1,3,10): mod_base = OTHER; note = 2-Prime-Fluoro modified nucleoside
  modified_base order(2,4..5,9,11..32): mod_base = OTHER; note = 2-Prime-O-Methyl modified nucleoside
  modified_base order(1^2,31^32): mod_base = OTHER; note = (1,3-dimethylimidazolidin-2-ylidene) Phosphoramidate linkage
  modified_base order(2..8,9..31): mod_base = OTHER; note = Phosphorothioate linkage
  modified_base 8^9: mod_base = OTHER; note = Methylphosphonate linkage
  misc_feature 1..32: note = RM115005

SEQ ID NO: 361 - DNA, 32 bp, synthetic construct; identical to SEQ ID NO: 76
  source 1..32: mol_type = other DNA
  misc_feature 19..20: note = DNA
  misc_feature order(1..18,21..32): note = RNA
  modified_base 18: mod_base = OTHER; note = 2-Prime-O-Methoxyethyl modified 5-methyl Uridine
  modified_base 19: mod_base = OTHER; note = DNA nucleotide carrying a 6-amino-5-nitro-3-yl-2(1H)-pyridone nucleobase
  modified_base order(1,3,7,9..10,22,29..31): mod_base = OTHER; note = 2-Prime-Fluoro modified nucleoside
  modified_base order(2,4..6,8,11..17,21,23..28,32): mod_base = OTHER; note = 2-Prime-O-Methyl modified nucleoside
  modified_base order(1^2,31^32): mod_base = OTHER; note = (1,3-dimethylimidazolidin-2-ylidene) Phosphoramidate linkage
  modified_base order(2..20,21..31): mod_base = OTHER; note = Phosphorothioate linkage
  modified_base 20^21: mod_base = OTHER; note = Methylphosphonate linkage
  misc_feature 1..32: note = RM115006

SEQ ID NO: 362 - DNA, 32 bp, synthetic construct; identical to SEQ ID NO: 73
  source 1..32: mol_type = other DNA
  misc_feature 28..29: note = DNA
  misc_feature order(1..27,30..32): note = RNA
  modified_base 27: mod_base = OTHER; note = 2-Prime-O-Methoxyethyl modified 5-methyl Uridine
  modified_base 28: mod_base = OTHER; note = DNA nucleotide carrying a 6-amino-5-nitro-3-yl-2(1H)-pyridone nucleobase
  modified_base order(10,12,16,18..19,31): mod_base = OTHER; note = 2-Prime-Fluoro modified nucleoside
  modified_base order(1..9,11,13..15,17,20..26,30,32): mod_base = OTHER; note = 2-Prime-O-Methyl modified nucleoside
  modified_base order(1^2,31^32): mod_base = OTHER; note = (1,3-dimethylimidazolidin-2-ylidene) Phosphoramidate linkage
  modified_base order(2..29,30^31): mod_base = OTHER; note = Phosphorothioate linkage
  modified_base 29^30: mod_base = OTHER; note = Methylphosphonate linkage
  misc_feature 1..32: note = RM115007

SEQ ID NO: 363 - DNA, 32 bp, synthetic construct; identical to SEQ ID NO: 74
  source 1..32: mol_type = other DNA
  misc_feature 25..26: note = DNA
  misc_feature order(1..24,27..32): note = RNA
  modified_base 24: mod_base = OTHER; note = 2-Prime-O-Methoxyethyl modified 5-methyl Uridine
  modified_base 25: mod_base = OTHER; note = DNA nucleotide carrying a 6-amino-5-nitro-3-yl-2(1H)-pyridone nucleobase
  modified_base order(7,9,13,15..16,28): mod_base = OTHER; note = 2-Prime-Fluoro modified nucleoside
  modified_base order(1..6,8,10..12,14,17..23,27,29..32): mod_base = OTHER; note = 2-Prime-O-Methyl modified nucleoside
  modified_base order(1^2,31^32): mod_base = OTHER; note = (1,3-dimethylimidazolidin-2-ylidene) Phosphoramidate linkage
  modified_base order(2..26,27..31): mod_base = OTHER; note = Phosphorothioate linkage
  modified_base 26^27: mod_base = OTHER; note = Methylphosphonate linkage
  misc_feature 1..32: note = RM115008

SEQ ID NO: 364 - DNA, 32 bp, synthetic construct; identical to SEQ ID NO: 75
  source 1..32: mol_type = other DNA
  misc_feature 22..23: note = DNA
  misc_feature order(1..21,24..32): note = RNA
  modified_base 21: mod_base = OTHER; note = 2-Prime-O-Methoxyethyl modified 5-methyl Uridine
  modified_base 22: mod_base = OTHER; note = DNA nucleotide carrying a 6-amino-5-nitro-3-yl-2(1H)-pyridone nucleobase
  modified_base order(4,6,10,12..13,25): mod_base = OTHER; note = 2-Prime-Fluoro modified nucleoside
  modified_base order(1..3,5,7..9,11,14..20,24,26..32): mod_base = OTHER; note = 2-Prime-O-Methyl modified nucleoside
  modified_base order(1^2,31^32): mod_base = OTHER; note = (1,3-dimethylimidazolidin-2-ylidene) Phosphoramidate linkage
  modified_base order(2..23,24..31): mod_base = OTHER; note = Phosphorothioate linkage
  modified_base 23^24: mod_base = OTHER; note = Methylphosphonate linkage
  misc_feature 1..32: note = RM115009

SEQ ID NO: 365 - DNA, 32 bp, synthetic construct; identical to SEQ ID NO: 76
  source 1..32: mol_type = other DNA
  misc_feature 19..20: note = DNA
  misc_feature order(1..18,21..32): note = RNA
  modified_base 18: mod_base = OTHER; note = 2-Prime-O-Methoxyethyl modified 5-methyl Uridine
  modified_base 19: mod_base = OTHER; note = DNA nucleotide carrying a 6-amino-5-nitro-3-yl-2(1H)-pyridone nucleobase
  modified_base order(1,3,7,9..10,22): mod_base = OTHER; note = 2-Prime-Fluoro modified nucleoside
  modified_base order(2,4..6,8,11..17,21,23..32): mod_base = OTHER; note = 2-Prime-O-Methyl modified nucleoside
  modified_base order(1^2,31^32): mod_base = OTHER; note = (1,3-dimethylimidazolidin-2-ylidene) Phosphoramidate linkage
  modified_base order(2..20,21..31): mod_base = OTHER; note = Phosphorothioate linkage
  modified_base 20^21: mod_base = OTHER; note = Methylphosphonate linkage
  misc_feature 1..32: note = RM115010

SEQ ID NO: 366 - DNA, 32 bp, synthetic construct; identical to SEQ ID NO: 73
  source 1..32: mol_type = other DNA
  misc_feature 28..29: note = DNA
  misc_feature order(1..27,30..32): note = RNA
  modified_base 27: mod_base = OTHER; note = 2-Prime-O-Methoxyethyl modified 5-methyl Uridine
  modified_base 28: mod_base = OTHER; note = DNA nucleotide carrying a 6-amino-5-nitro-3-yl-2(1H)-pyridone nucleobase
  modified_base order(18..19,31): mod_base = OTHER; note = 2-Prime-Fluoro modified nucleoside
  modified_base order(1..17,20..26,30,32): mod_base = OTHER; note = 2-Prime-O-Methyl modified nucleoside
  modified_base order(1^2,31^32): mod_base = OTHER; note = (1,3-dimethylimidazolidin-2-ylidene) Phosphoramidate linkage
  modified_base order(2..29,30^31): mod_base = OTHER; note = Phosphorothioate linkage
  modified_base 29^30: mod_base = OTHER; note = Methylphosphonate linkage
  misc_feature 1..32: note = RM115011

SEQ ID NO: 367 - DNA, 32 bp, synthetic construct; identical to SEQ ID NO: 74
  source 1..32: mol_type = other DNA
  misc_feature 25..26: note = DNA
  misc_feature order(1..24,27..32): note = RNA
  modified_base 24: mod_base = OTHER; note = 2-Prime-O-Methoxyethyl modified 5-methyl Uridine
  modified_base 25: mod_base = OTHER; note = DNA nucleotide carrying a 6-amino-5-nitro-3-yl-2(1H)-pyridone nucleobase
  modified_base order(15..16,28): mod_base = OTHER; note = 2-Prime-Fluoro modified nucleoside
  modified_base order(1..14,17..23,27,29..32): mod_base = OTHER; note = 2-Prime-O-Methyl modified nucleoside
  modified_base order(1^2,31^32): mod_base = OTHER; note = (1,3-dimethylimidazolidin-2-ylidene) Phosphoramidate linkage
  modified_base order(2..26,27..31): mod_base = OTHER; note = Phosphorothioate linkage
  modified_base 26^27: mod_base = OTHER; note = Methylphosphonate linkage
  misc_feature 1..32: note = RM115012

SEQ ID NO: 368 - DNA, 32 bp, synthetic construct; identical to SEQ ID NO: 75
  source 1..32: mol_type = other DNA
  misc_feature 22..23: note = DNA
  misc_feature order(1..21,24..32): note = RNA
  modified_base 21: mod_base = OTHER; note = 2-Prime-O-Methoxyethyl modified 5-methyl Uridine
  modified_base 22: mod_base = OTHER; note = DNA nucleotide carrying a 6-amino-5-nitro-3-yl-2(1H)-pyridone nucleobase
  modified_base order(12..13,25): mod_base = OTHER; note = 2-Prime-Fluoro modified nucleoside
  modified_base order(1..11,14..20,24,26..32): mod_base = OTHER; note = 2-Prime-O-Methyl modified nucleoside
  modified_base order(1^2,31^32): mod_base = OTHER; note = (1,3-dimethylimidazolidin-2-ylidene) Phosphoramidate linkage
  modified_base order(2..23,24..31): mod_base = OTHER; note = Phosphorothioate linkage
  modified_base 23^24: mod_base = OTHER; note = Methylphosphonate linkage
  misc_feature 1..32: note = RM115013

SEQ ID NO: 369 - DNA, 32 bp, synthetic construct; identical to SEQ ID NO: 76
  source 1..32: mol_type = other DNA
  misc_feature 19..20: note = DNA
  misc_feature order(1..18,21..32): note = RNA
  modified_base 18: mod_base = OTHER; note = 2-Prime-O-Methoxyethyl modified 5-methyl Uridine
  modified_base 19: mod_base = OTHER; note = DNA nucleotide carrying a 6-amino-5-nitro-3-yl-2(1H)-pyridone nucleobase
  modified_base order(9..10,22): mod_base = OTHER; note = 2-Prime-Fluoro modified nucleoside
  modified_base order(1..8,11..17,21,23..32): mod_base = OTHER; note = 2-Prime-O-Methyl modified nucleoside
  modified_base order(1^2,31^32): mod_base = OTHER; note = (1,3-dimethylimidazolidin-2-ylidene) Phosphoramidate linkage
  modified_base order(2..20,21..31): mod_base = OTHER; note = Phosphorothioate linkage
  modified_base 20^21: mod_base = OTHER; note = Methylphosphonate linkage
  misc_feature 1..32: note = RM115014

SEQ ID NO: 370 - DNA, 32 bp, synthetic construct; identical to SEQ ID NO: 77
  source 1..32: mol_type = other DNA
  misc_feature 16..17: note = DNA
  misc_feature order(1..15,18..32): note = RNA
  modified_base 15: mod_base = OTHER; note = 2-Prime-O-Methoxyethyl modified 5-methyl Uridine
  modified_base 16: mod_base = OTHER; note = DNA nucleotide carrying a 6-amino-5-nitro-3-yl-2(1H)-pyridone nucleobase
  modified_base order(6..7,19): mod_base = OTHER; note = 2-Prime-Fluoro modified nucleoside
  modified_base order(1..5,8..14,18,20..32): mod_base = OTHER; note = 2-Prime-O-Methyl modified nucleoside
  modified_base order(1^2,31^32): mod_base = OTHER; note = (1,3-dimethylimidazolidin-2-ylidene) Phosphoramidate linkage
  modified_base order(2..17,18..31): mod_base = OTHER; note = Phosphorothioate linkage
  modified_base 17^18: mod_base = OTHER; note = Methylphosphonate linkage
  misc_feature 1..32: note = RM115015

SEQ ID NO: 371 - DNA, 32 bp, synthetic construct; identical to SEQ ID NO: 78
  source 1..32: mol_type = other DNA
  misc_feature 13..14: note = DNA
  misc_feature order(1..12,15..32): note = RNA
  modified_base 12: mod_base = OTHER; note = 2-Prime-O-Methoxyethyl modified 5-methyl Uridine
  modified_base 13: mod_base = OTHER; note = DNA nucleotide carrying a 6-amino-5-nitro-3-yl-2(1H)-pyridone nucleobase
  modified_base order(3..4,16): mod_base = OTHER; note = 2-Prime-Fluoro modified nucleoside
  modified_base order(1..2,5..11,15,17..32): mod_base = OTHER; note = 2-Prime-O-Methyl modified nucleoside
  modified_base order(1^2,31^32): mod_base = OTHER; note = (1,3-dimethylimidazolidin-2-ylidene) Phosphoramidate linkage
  modified_base order(2..14,15..31): mod_base = OTHER; note = Phosphorothioate linkage
  modified_base 14^15: mod_base = OTHER; note = Methylphosphonate linkage
  misc_feature 1..32: note = RM115016

SEQ ID NO: 372 - DNA, 29 bp, synthetic construct
  source 1..29: mol_type = other DNA
  misc_feature 24..25: note = DNA
  misc_feature order(1..23,26..29): note = RNA
  modified_base 23: mod_base = OTHER; note = 2-Prime-O-Methoxyethyl modified 5-methyl Uridine
  modified_base 24: mod_base = OTHER; note = DNA nucleotide carrying a 6-amino-5-nitro-3-yl-2(1H)-pyridone nucleobase
  modified_base order(4,6,9,15,20..21,27,29): mod_base = OTHER; note = 2-Prime-Fluoro modified nucleoside
  modified_base order(1..3,5,7..8,10..14,16..19,22,26,28): mod_base = OTHER; note = 2-Prime-O-Methyl modified nucleoside
  modified_base order(1^2,28^29): mod_base = OTHER; note = (1,3-dimethylimidazolidin-2-ylidene) Phosphoramidate linkage
  modified_base order(2..25,26..28): mod_base = OTHER; note = Phosphorothioate linkage
  modified_base 25^26: mod_base = OTHER; note = Methylphosphonate linkage
  misc_feature 1..29: note = RM115017
gtcattaatttggcccttcgtctnatgga

SEQ ID NO: 373 - DNA, 29 bp, synthetic construct
  source 1..29: mol_type = other DNA
  misc_feature 21..22: note = DNA
  misc_feature order(1..20,23..29): note = RNA
  modified_base 20: mod_base = OTHER; note = 2-Prime-O-Methoxyethyl modified 5-methyl Uridine
  modified_base 21: mod_base = OTHER; note = DNA nucleotide carrying a 6-amino-5-nitro-3-yl-2(1H)-pyridone nucleobase
  modified_base order(1,3,6,12,17..18,24,26): mod_base = OTHER; note = 2-Prime-Fluoro modified nucleoside
  modified_base order(2,4..5,7..11,13..16,19,23,25,27..29): mod_base = OTHER; note = 2-Prime-O-Methyl modified nucleoside
  modified_base order(1^2,28^29): mod_base = OTHER; note = (1,3-dimethylimidazolidin-2-ylidene) Phosphoramidate linkage
  modified_base order(2..22,23..28): mod_base = OTHER; note = Phosphorothioate linkage
  modified_base 22^23: mod_base = OTHER; note = Methylphosphonate linkage
  misc_feature 1..29: note = RM115018
attaatttggcccttcgtctnatggacaa

SEQ ID NO: 374 - DNA, 29 bp, synthetic construct
  source 1..29: mol_type = other DNA
  misc_feature 6..7: note = DNA
  misc_feature order(1..5,8..29): note = RNA
  modified_base 5: mod_base = OTHER; note = 2-Prime-O-Methoxyethyl modified 5-methyl Uridine
  modified_base 6: mod_base = OTHER; note = DNA nucleotide carrying a 6-amino-5-nitro-3-yl-2(1H)-pyridone nucleobase
  modified_base order(3,9,11..12,17,23,26,28): mod_base = OTHER; note = 2-Prime-Fluoro modified nucleoside
  modified_base order(1..2,4,8,10,13..16,18..22,24..25,27,29): mod_base = OTHER; note = 2-Prime-O-Methyl modified nucleoside
  modified_base order(1^2,28^29): mod_base = OTHER; note = (1,3-dimethylimidazolidin-2-ylidene) Phosphoramidate linkage
  modified_base order(2..7,8..28): mod_base = OTHER; note = Phosphorothioate linkage
  modified_base 7^8: mod_base = OTHER; note = Methylphosphonate linkage
  misc_feature 1..29: note = RM115019
cgtctnatggacaaagtctttaagaccat

SEQ ID NO: 375 - DNA, 26 bp, synthetic construct
  source 1..26: mol_type = other DNA
  misc_feature 19..20: note = DNA
  misc_feature order(1..18,21..26): note = RNA
  modified_base 18: mod_base = OTHER; note = 2-Prime-O-Methoxyethyl modified 5-methyl Uridine
  modified_base 19: mod_base = OTHER; note = DNA nucleotide carrying a 6-amino-5-nitro-3-yl-2(1H)-pyridone nucleobase
  modified_base order(10,15..16,22,24): mod_base = OTHER; note = 2-Prime-Fluoro modified nucleoside
  modified_base order(1..9,11..14,17,21,23,25..26): mod_base = OTHER; note = 2-Prime-O-Methyl modified nucleoside
  modified_base order(1^2,25^26): mod_base = OTHER; note = (1,3-dimethylimidazolidin-2-ylidene) Phosphoramidate linkage
  modified_base order(2..20,21..25): mod_base = OTHER; note = Phosphorothioate linkage
  modified_base 20^21: mod_base = OTHER; note = Methylphosphonate linkage
  misc_feature 1..26: note = RM115020
taatttggcccttcgtctnatggaca

SEQ ID NO: 376 - DNA, 26 bp, synthetic construct
  source 1..26: mol_type = other DNA
  misc_feature 16..17: note = DNA
  misc_feature order(1..15,18..26): note = RNA
  modified_base 15: mod_base = OTHER; note = 2-Prime-O-Methoxyethyl modified 5-methyl Uridine
  modified_base 16: mod_base = OTHER; note = DNA nucleotide carrying a 6-amino-5-nitro-3-yl-2(1H)-pyridone nucleobase
  modified_base order(7,12..13,19,21): mod_base = OTHER; note = 2-Prime-Fluoro modified nucleoside
  modified_base order(1..6,8..11,14,18,20,22..26): mod_base = OTHER; note = 2-Prime-O-Methyl modified nucleoside
  modified_base order(1^2,25^26): mod_base = OTHER; note = (1,3-dimethylimidazolidin-2-ylidene) Phosphoramidate linkage
  modified_base order(2..17,18..25): mod_base = OTHER; note = Phosphorothioate linkage
  modified_base 17^18: mod_base = OTHER; note = Methylphosphonate linkage
  misc_feature 1..26: note = RM115021
tttggcccttcgtctnatggacaaag

SEQ ID NO: 377 - DNA, 26 bp, synthetic construct
  source 1..26: mol_type = other DNA
  misc_feature 13..14: note = DNA
  misc_feature order(1..12,15..26): note = RNA
  modified_base 12: mod_base = OTHER; note = 2-Prime-O-Methoxyethyl modified 5-methyl Uridine
  modified_base 13: mod_base = OTHER; note = DNA nucleotide carrying a 6-amino-5-nitro-3-yl-2(1H)-pyridone nucleobase
  modified_base order(4,9..10,16,18): mod_base = OTHER; note = 2-Prime-Fluoro modified nucleoside
  modified_base order(1..3,5..8,11,15,17,19..26): mod_base = OTHER; note = 2-Prime-O-Methyl modified nucleoside
  modified_base order(1^2,25^26): mod_base = OTHER; note = (1,3-dimethylimidazolidin-2-ylidene) Phosphoramidate linkage
  modified_base order(2..14,15..25): mod_base = OTHER; note = Phosphorothioate linkage
  modified_base 14^15: mod_base = OTHER; note = Methylphosphonate linkage
  misc_feature 1..26: note = RM115022
ggcccttcgtctnatggacaaagtct

SEQ ID NO: 378 - DNA, 26 bp, synthetic construct
  source 1..26: mol_type = other DNA
  misc_feature 10..11: note = DNA
  misc_feature order(1..9,12..26): note = RNA
  modified_base 9: mod_base = OTHER; note = 2-Prime-O-Methoxyethyl modified 5-methyl Uridine
  modified_base 10: mod_base = OTHER; note = DNA nucleotide carrying a 6-amino-5-nitro-3-yl-2(1H)-pyridone nucleobase
  modified_base order(1,6..7,13,15): mod_base = OTHER; note = 2-Prime-Fluoro modified nucleoside
  modified_base order(2..5,8,12,14,16..26): mod_base = OTHER; note = 2-Prime-O-Methyl modified nucleoside
  modified_base order(1^2,25^26): mod_base = OTHER; note = (1,3-dimethylimidazolidin-2-ylidene) Phosphoramidate linkage
  modified_base order(2..11,12..25): mod_base = OTHER; note = Phosphorothioate linkage
  modified_base 11^12: mod_base = OTHER; note = Methylphosphonate linkage
  misc_feature 1..26: note = RM115023
ccttcgtctnatggacaaagtcttta

SEQ ID NO: 379 - DNA, 29 bp, synthetic construct
  source 1..29: mol_type = other DNA
  misc_feature 24..25: note = DNA
  misc_feature order(1..23,26..29): note = RNA
  modified_base 23: mod_base = OTHER; note = 2-Prime-O-Methoxyethyl modified 5-methyl Uridine
  modified_base 24: mod_base = OTHER; note = DNA nucleotide carrying a 6-amino-5-nitro-3-yl-2(1H)-pyridone nucleobase
  modified_base order(15,20..21,27,29): mod_base = OTHER; note = 2-Prime-Fluoro modified nucleoside
  modified_base order(1..14,16..19,22,26,28): mod_base = OTHER; note = 2-Prime-O-Methyl modified nucleoside
  modified_base order(1^2,28^29): mod_base = OTHER; note = (1,3-dimethylimidazolidin-2-ylidene) Phosphoramidate linkage
  modified_base order(2..25,26..28): mod_base = OTHER; note = Phosphorothioate linkage
  modified_base 25^26: mod_base = OTHER; note = Methylphosphonate linkage
  misc_feature 1..29: note = RM115024
gtcattaatttggcccttcgtctnatgga

SEQ ID NO: 380 - DNA, 29 bp, synthetic construct
  source 1..29: mol_type = other DNA
  misc_feature 21..22: note = DNA
  misc_feature order(1..20,23..29): note = RNA
  modified_base 20: mod_base = OTHER; note = 2-Prime-O-Methoxyethyl modified 5-methyl Uridine
  modified_base 21: mod_base = OTHER; note = DNA nucleotide carrying a 6-amino-5-nitro-3-yl-2(1H)-pyridone nucleobase
  modified_base order(12,17..18,24,26): mod_base = OTHER; note = 2-Prime-Fluoro modified nucleoside
  modified_base order(1..11,13..16,19,23,25,27..29): mod_base = OTHER; note = 2-Prime-O-Methyl modified nucleoside
  modified_base order(1^2,28^29): mod_base = OTHER; note = (1,3-dimethylimidazolidin-2-ylidene) Phosphoramidate linkage
  modified_base order(2..22,23..28): mod_base = OTHER; note = Phosphorothioate linkage
  modified_base 22^23: mod_base = OTHER; note = Methylphosphonate linkage
  misc_feature 1..29: note = RM115025
attaatttggcccttcgtctnatggacaa

SEQ ID NO: 381 - DNA, 29 bp, synthetic construct
  source 1..29: mol_type = other DNA
  misc_feature 18..19: note = DNA
  misc_feature order(1..17,20..29): note = RNA
  modified_base 17: mod_base = OTHER; note = 2-Prime-O-Methoxyethyl modified 5-methyl Uridine
  modified_base 18: mod_base = OTHER; note = DNA nucleotide carrying a 6-amino-5-nitro-3-yl-2(1H)-pyridone nucleobase
  modified_base order(9,14..15,21,23): mod_base = OTHER; note = 2-Prime-Fluoro modified nucleoside
  modified_base order(1..8,10..13,16,20,22,24..29): mod_base = OTHER; note = 2-Prime-O-Methyl modified nucleoside
  modified_base order(1^2,28^29): mod_base = OTHER; note = (1,3-dimethylimidazolidin-2-ylidene) Phosphoramidate linkage
  modified_base order(2..19,20..28): mod_base = OTHER; note = Phosphorothioate linkage
  modified_base 19^20: mod_base = OTHER; note = Methylphosphonate linkage
  misc_feature 1..29: note = RM115026
aatttggcccttcgtctnatggacaaagt

SEQ ID NO: 382 - DNA, 29 bp, synthetic construct
  source 1..29: mol_type = other DNA
  misc_feature 15..16: note = DNA
  misc_feature order(1..14,17..29): note = RNA
  modified_base 14: mod_base = OTHER; note = 2-Prime-O-Methoxyethyl modified 5-methyl Uridine
  modified_base 15: mod_base = OTHER; note = DNA nucleotide carrying a 6-amino-5-nitro-3-yl-2(1H)-pyridone nucleobase
  modified_base order(6,11..12,18,20): mod_base = OTHER; note = 2-Prime-Fluoro modified nucleoside
  modified_base order(1..5,7..10,13,17,19,21..29): mod_base = OTHER; note = 2-Prime-O-Methyl modified nucleoside
  modified_base order(1^2,28^29): mod_base = OTHER; note = (1,3-dimethylimidazolidin-2-ylidene) Phosphoramidate linkage
  modified_base order(2..16,17..28): mod_base = OTHER; note = Phosphorothioate linkage
  modified_base 16^17: mod_base = OTHER; note = Methylphosphonate linkage
  misc_feature 1..29: note = RM115027
ttggcccttcgtctnatggacaaagtctt

SEQ ID NO: 383 - DNA, 29 bp, synthetic construct
  source 1..29: mol_type = other DNA
  misc_feature 12..13: note = DNA
  misc_feature order(1..11,14..29): note = RNA
  modified_base 11: mod_base = OTHER; note = 2-Prime-O-Methoxyethyl modified 5-methyl Uridine
  modified_base 12: mod_base = OTHER; note = DNA nucleotide carrying a 6-amino-5-nitro-3-yl-2(1H)-pyridone nucleobase
  modified_base order(3,8..9,15,17): mod_base = OTHER; note = 2-Prime-Fluoro modified nucleoside
  modified_base order(1..2,4..7,10,14,16,18..29): mod_base = OTHER; note = 2-Prime-O-Methyl modified nucleoside
  modified_base order(1^2,28^29): mod_base = OTHER; note = (1,3-dimethylimidazolidin-2-ylidene) Phosphoramidate linkage
  modified_base order(2..13,14..28): mod_base = OTHER; note = Phosphorothioate linkage
  modified_base 13^14: mod_base = OTHER; note = Methylphosphonate linkage
  misc_feature 1..29: note = RM115028
gcccttcgtctnatggacaaagtctttaa

SEQ ID NO: 384 - DNA, 26 bp, synthetic construct
  source 1..26: mol_type = other DNA
  misc_feature 13..14: note = DNA
  misc_feature order(1..12,15..26): note = RNA
  modified_base 12: mod_base = OTHER; note = 2-Prime-O-Methoxyethyl modified 5-methyl Uridine
  modified_base 13: mod_base = OTHER; note = DNA nucleotide carrying a 6-amino-5-nitro-3-yl-2(1H)-pyridone nucleobase
  modified_base order(10,16,18..19,24): mod_base = OTHER; note = 2-Prime-Fluoro modified nucleoside
  modified_base order(1..9,11,15,17,20..23,25..26): mod_base = OTHER; note = 2-Prime-O-Methyl modified nucleoside
  modified_base order(1^2,25^26): mod_base = OTHER; note = (1,3-dimethylimidazolidin-2-ylidene) Phosphoramidate linkage
  modified_base order(2..14,15..25): mod_base = OTHER; note = Phosphorothioate linkage
  modified_base 14^15: mod_base = OTHER; note = Methylphosphonate linkage
  misc_feature 1..26: note = RM115029
ggcccttcgtctnatggacaaagtct

SEQ ID NO: 385 - DNA, 26 bp, synthetic construct
  source 1..26: mol_type = other DNA
  misc_feature 10..11: note = DNA
  misc_feature order(1..9,12..26): note = RNA
  modified_base 9: mod_base = OTHER; note = 2-Prime-O-Methoxyethyl modified 5-methyl Uridine
  modified_base 10: mod_base = OTHER; note = DNA nucleotide carrying a 6-amino-5-nitro-3-yl-2(1H)-pyridone nucleobase
  modified_base order(7,13,15..16,21): mod_base = OTHER; note = 2-Prime-Fluoro modified nucleoside
  modified_base order(1..6,8,12,14,17..20,22..26): mod_base = OTHER; note = 2-Prime-O-Methyl modified nucleoside
  modified_base order(1^2,25^26): mod_base = OTHER; note = (1,3-dimethylimidazolidin-2-ylidene) Phosphoramidate linkage
  modified_base order(2..11,12..25): mod_base = OTHER; note = Phosphorothioate linkage
  modified_base 11^12: mod_base = OTHER; note = Methylphosphonate linkage
  misc_feature 1..26: note = RM115030
ccttcgtctnatggacaaagtcttta

SEQ ID NO: 386 - DNA, 26 bp, synthetic construct
  source 1..26: mol_type = other DNA
  misc_feature 7..8: note = DNA
  misc_feature order(1..6,9..26): note = RNA
  modified_base 6: mod_base = OTHER; note = 2-Prime-O-Methoxyethyl modified 5-methyl Uridine
  modified_base 7: mod_base = OTHER; note = DNA nucleotide carrying a 6-amino-5-nitro-3-yl-2(1H)-pyridone nucleobase
  modified_base order(4,10,12..13,18): mod_base = OTHER; note = 2-Prime-Fluoro modified nucleoside
  modified_base order(1..3,5,9,11,14..17,19..26): mod_base = OTHER; note = 2-Prime-O-Methyl modified nucleoside
  modified_base order(1^2,25^26): mod_base = OTHER; note = (1,3-dimethylimidazolidin-2-ylidene) Phosphoramidate linkage
  modified_base order(2..8,9..25): mod_base = OTHER; note = Phosphorothioate linkage
  modified_base 8^9: mod_base = OTHER; note = Methylphosphonate linkage
  misc_feature 1..26: note = RM115031
tcgtctnatggacaaagtctttaaga

SEQ ID NO: 387 - DNA, 29 bp, synthetic construct
  source 1..29: mol_type = other DNA
  misc_feature 18..19: note = DNA
  misc_feature order(1..17,20..29): note = RNA
  modified_base 17: mod_base = OTHER; note = 2-Prime-O-Methoxyethyl modified 5-methyl Uridine
  modified_base 18: mod_base = OTHER; note = DNA nucleotide carrying a 6-amino-5-nitro-3-yl-2(1H)-pyridone nucleobase
  modified_base order(15,21,23..24,29): mod_base = OTHER; note = 2-Prime-Fluoro modified nucleoside
  modified_base order(1..14,16,20,22,25..28): mod_base = OTHER; note = 2-Prime-O-Methyl modified nucleoside
  modified_base order(1^2,28^29): mod_base = OTHER; note = (1,3-dimethylimidazolidin-2-ylidene) Phosphoramidate linkage
  modified_base order(2..19,20..28): mod_base = OTHER; note = Phosphorothioate linkage
  modified_base 19^20: mod_base = OTHER; note = Methylphosphonate linkage
  misc_feature 1..29: note = RM115032
aatttggcccttcgtctnatggacaaagt

SEQ ID NO: 388 - DNA, 29 bp, synthetic construct
  source 1..29: mol_type = other DNA
  misc_feature 15..16: note = DNA
  misc_feature order(1..14,17..29): note = RNA
  modified_base 14: mod_base = OTHER; note = 2-Prime-O-Methoxyethyl modified 5-methyl Uridine
  modified_base 15: mod_base = OTHER; note = DNA nucleotide carrying a 6-amino-5-nitro-3-yl-2(1H)-pyridone nucleobase
  modified_base order(12,18,20..21,26): mod_base = OTHER; note = 2-Prime-Fluoro modified nucleoside
  modified_base order(1..11,13,17,19,22..25,27..29): mod_base = OTHER; note = 2-Prime-O-Methyl modified nucleoside
  modified_base order(1^2,28^29): mod_base = OTHER; note = (1,3-dimethylimidazolidin-2-ylidene) Phosphoramidate linkage
  modified_base order(2..16,17..28): mod_base = OTHER; note = Phosphorothioate linkage
  modified_base 16^17: mod_base = OTHER; note = Methylphosphonate linkage
  misc_feature 1..29: note = RM115033
ttggcccttcgtctnatggacaaagtctt

SEQ ID NO: 389 - DNA, 29 bp, synthetic construct
  source 1..29: mol_type = other DNA
  misc_feature 12..13: note = DNA
  misc_feature order(1..11,14..29): note = RNA
  modified_base 11: mod_base = OTHER; note = 2-Prime-O-Methoxyethyl modified 5-methyl Uridine
  modified_base 12: mod_base = OTHER; note = DNA nucleotide carrying a 6-amino-5-nitro-3-yl-2(1H)-pyridone nucleobase
  modified_base order(9,15,17..18,23): mod_base = OTHER; note = 2-Prime-Fluoro modified nucleoside
  modified_base order(1..8,10,14,16,19..22,24..29): mod_base = OTHER; note = 2-Prime-O-Methyl modified nucleoside
  modified_base order(1^2,28^29): mod_base = OTHER; note = (1,3-dimethylimidazolidin-2-ylidene) Phosphoramidate linkage
  modified_base order(2..13,14..28): mod_base = OTHER; note = Phosphorothioate linkage
  modified_base 13^14: mod_base = OTHER; note = Methylphosphonate linkage
  misc_feature 1..29: note = RM115034
gcccttcgtctnatggacaaagtctttaa

SEQ ID NO: 390 - DNA, 29 bp, synthetic construct
  source 1..29: mol_type = other DNA
  misc_feature 9..10: note = DNA
  misc_feature order(1..8,11..29): note = RNA
  modified_base 8: mod_base = OTHER; note = 2-Prime-O-Methoxyethyl modified 5-methyl Uridine
  modified_base 9: mod_base = OTHER; note = DNA nucleotide carrying a 6-amino-5-nitro-3-yl-2(1H)-pyridone nucleobase
  modified_base order(6,12,14..15,20): mod_base = OTHER; note = 2-Prime-Fluoro modified nucleoside
  modified_base order(1..5,7,11,13,16..19,21..29): mod_base = OTHER; note = 2-Prime-O-Methyl modified nucleoside
  modified_base order(1^2,28^29): mod_base = OTHER; note = (1,3-dimethylimidazolidin-2-ylidene) Phosphoramidate linkage
  modified_base order(2..10,11..28): mod_base = OTHER; note = Phosphorothioate linkage
  modified_base 10^11: mod_base = OTHER; note = Methylphosphonate linkage
  misc_feature 1..29: note = RM115035
cttcgtctnatggacaaagtctttaagac

SEQ ID NO: 391 - DNA, 29 bp, synthetic construct
  source 1..29: mol_type = other DNA
  misc_feature 6..7: note = DNA
  misc_feature order(1..5,8..29): note = RNA
  modified_base 5: mod_base = OTHER; note = 2-Prime-O-Methoxyethyl modified 5-methyl Uridine
  modified_base 6: mod_base = OTHER; note = DNA nucleotide carrying a 6-amino-5-nitro-3-yl-2(1H)-pyridone nucleobase
  modified_base order(3,9,11..12,17): mod_base = OTHER; note = 2-Prime-Fluoro modified nucleoside
  modified_base order(1..2,4,8,10,13..16,18..29): mod_base = OTHER; note = 2-Prime-O-Methyl modified nucleoside
  modified_base order(1^2,28^29): mod_base = OTHER; note = (1,3-dimethylimidazolidin-2-ylidene) Phosphoramidate linkage
  modified_base order(2..7,8..28): mod_base = OTHER; note = Phosphorothioate linkage
  modified_base 7^8: mod_base = OTHER; note = Methylphosphonate linkage
  misc_feature 1..29: note = RM115036
cgtctnatggacaaagtctttaagaccat

SEQ ID NO: 392 - DNA, 32 bp, synthetic construct; identical to SEQ ID NO: 78
  source 1..32: mol_type = other DNA
  misc_feature 13..14: note = DNA
  misc_feature order(1..12,15..32): note = RNA
  modified_base 12: mod_base = OTHER; note = 2-Prime-O-Methoxyethyl modified 5-methyl Uridine
  modified_base 13: mod_base = OTHER; note = DNA nucleotide carrying a 6-amino-5-nitro-3-yl-2(1H)-pyridone nucleobase
  modified_base order(6..7,9,16,24..25,27..28,30): mod_base = OTHER; note = 2-Prime-Fluoro modified nucleoside
  modified_base order(1..5,8,10..11,15,17..23,26,29,31..32): mod_base = OTHER; note = 2-Prime-O-Methyl modified nucleoside
  modified_base order(1^2,31^32): mod_base = OTHER; note = (1,3-dimethylimidazolidin-2-ylidene) Phosphoramidate linkage
  modified_base order(2..14,15..31): mod_base = OTHER; note = Phosphorothioate linkage
  modified_base 14^15: mod_base = OTHER; note = Methylphosphonate linkage
  misc_feature 1..32: note = RM115037

SEQ ID NO: 393 - DNA, 32 bp, synthetic construct; identical to SEQ ID NO: 79
  source 1..32: mol_type = other DNA
  misc_feature 10..11: note = DNA
  misc_feature order(1..9,12..32): note = RNA
  modified_base 9: mod_base = OTHER; note = 2-Prime-O-Methoxyethyl modified 5-methyl Uridine
  modified_base 10: mod_base = OTHER; note = DNA nucleotide carrying a 6-amino-5-nitro-3-yl-2(1H)-pyridone nucleobase
  modified_base order(3..4,6,13,21..22,24..25,27): mod_base = OTHER; note = 2-Prime-Fluoro modified nucleoside
  modified_base order(1..2,5,7..8,12,14..20,23,26,28..32): mod_base = OTHER; note = 2-Prime-O-Methyl modified nucleoside
  modified_base order(1^2,31^32): mod_base = OTHER; note = (1,3-dimethylimidazolidin-2-ylidene) Phosphoramidate linkage
  modified_base order(2..11,12..31): mod_base = OTHER; note = Phosphorothioate linkage
  modified_base 11^12: mod_base = OTHER; note = Methylphosphonate linkage
  misc_feature 1..32: note = RM115038

SEQ ID NO: 394 - DNA, 32 bp, synthetic construct; identical to SEQ ID NO: 75
  source 1..32: mol_type = other DNA
  misc_feature 22..23: note = DNA
  misc_feature order(1..21,24..32): note = RNA
  modified_base 21: mod_base = OTHER; note = 2-Prime-O-Methoxyethyl modified 5-methyl Uridine
  modified_base 22: mod_base = OTHER; note = DNA nucleotide carrying a 6-amino-5-nitro-3-yl-2(1H)-pyridone nucleobase
  modified_base order(7,9..10,12..13,25,28,30..31): mod_base = OTHER; note = 2-Prime-Fluoro modified nucleoside
  modified_base order(1..6,8,11,14..20,24,26..27,29,32): mod_base = OTHER; note = 2-Prime-O-Methyl modified nucleoside
  modified_base order(1^2,31^32): mod_base = OTHER; note = (1,3-dimethylimidazolidin-2-ylidene) Phosphoramidate linkage
  modified_base order(2..23,24..31): mod_base = OTHER; note = Phosphorothioate linkage
  modified_base 23^24: mod_base = OTHER; note = Methylphosphonate linkage
  misc_feature 1..32: note = RM115039

SEQ ID NO: 395 - DNA, 32 bp, synthetic construct; identical to SEQ ID NO: 76
  source 1..32: mol_type = other DNA
  misc_feature 19..20: note = DNA
  misc_feature order(1..18,21..32): note = RNA
  modified_base 18: mod_base = OTHER; note = 2-Prime-O-Methoxyethyl modified 5-methyl Uridine
  modified_base 19: mod_base = OTHER; note = DNA nucleotide carrying a 6-amino-5-nitro-3-yl-2(1H)-pyridone nucleobase
  modified_base order(4,6..7,9..10,22,25,27..28): mod_base = OTHER; note = 2-Prime-Fluoro modified nucleoside
  modified_base order(1..3,5,8,11..17,21,23..24,26,29..32): mod_base = OTHER; note = 2-Prime-O-Methyl modified nucleoside
  modified_base order(1^2,31^32): mod_base = OTHER; note = (1,3-dimethylimidazolidin-2-ylidene) Phosphoramidate linkage
  modified_base order(2..20,21..31): mod_base = OTHER; note = Phosphorothioate linkage
  modified_base 20^21: mod_base = OTHER; note = Methylphosphonate linkage
  misc_feature 1..32: note = RM115040

SEQ ID NO: 396 - DNA, 32 bp, synthetic construct; identical to SEQ ID NO: 77
  source 1..32: mol_type = other DNA
  misc_feature 16..17: note = DNA
  misc_feature order(1..15,18..32): note = RNA
  modified_base 15: mod_base = OTHER; note = 2-Prime-O-Methoxyethyl modified 5-methyl Uridine
  modified_base 16: mod_base = OTHER; note = DNA nucleotide carrying a 6-amino-5-nitro-3-yl-2(1H)-pyridone nucleobase
  modified_base order(1,3..4,6..7,19,22,24..25): mod_base = OTHER; note = 2-Prime-Fluoro modified nucleoside
  modified_base order(2,5,8..14,18,20..21,23,26..32): mod_base = OTHER; note = 2-Prime-O-Methyl modified nucleoside
  modified_base order(1^2,31^32): mod_base = OTHER; note = (1,3-dimethylimidazolidin-2-ylidene) Phosphoramidate linkage
  modified_base order(2..17,18..31): mod_base = OTHER; note = Phosphorothioate linkage
  modified_base 17^18: mod_base = OTHER; note = Methylphosphonate linkage
  misc_feature 1..32: note = RM115041

SEQ ID NO: 397 - DNA, 23 bp, synthetic construct
  source 1..23: mol_type = other DNA
  misc_feature 9..10: note = DNA
  misc_feature order(1..8,11..23): note = RNA
  modified_base 8: mod_base = OTHER; note = 2-Prime-O-Methoxyethyl modified 5-methyl Uridine
  modified_base 9: mod_base = OTHER; note = DNA nucleotide carrying a 6-amino-5-nitro-3-yl-2(1H)-pyridone nucleobase
  modified_base order(3,5,12,20..21,23): mod_base = OTHER; note = 2-Prime-Fluoro modified nucleoside
  modified_base order(1..2,4,6..7,11,13..19,22): mod_base = OTHER; note = 2-Prime-O-Methyl modified nucleoside
  modified_base order(1^2,22^23): mod_base = OTHER; note = (1,3-dimethylimidazolidin-2-ylidene) Phosphoramidate linkage
  modified_base order(2..10,11..22): mod_base = OTHER; note = Phosphorothioate linkage
  modified_base 10^11: mod_base = OTHER; note = Methylphosphonate linkage
  misc_feature 1..23: note = RM115042
cttcgtctnatggacaaagtctt

SEQ ID NO: 398 - DNA, 32 bp, synthetic construct; identical to SEQ ID NO: 77
  source 1..32: mol_type = other DNA
  misc_feature 16..17: note = DNA
  misc_feature order(1..15,18..32): note = RNA
  modified_base 15: mod_base = OTHER; note = 2-Prime-O-Methoxyethyl modified 5-methyl Uridine
  modified_base 16: mod_base = OTHER; note = DNA nucleotide carrying a 6-amino-5-nitro-3-yl-2(1H)-pyridone nucleobase
  modified_base order(10,12,19,27..28,30): mod_base = OTHER; note = 2-Prime-Fluoro modified nucleoside
  modified_base order(1..9,11,13..14,18,20..26,29,31..32): mod_base = OTHER; note = 2-Prime-O-Methyl modified nucleoside
  modified_base order(1^2,31^32): mod_base = OTHER; note = (1,3-dimethylimidazolidin-2-ylidene) Phosphoramidate linkage
  modified_base order(2..17,18..31): mod_base = OTHER; note = Phosphorothioate linkage
  modified_base 17^18: mod_base = OTHER; note = Methylphosphonate linkage
  misc_feature 1..32: note = RM115043

SEQ ID NO: 399 - DNA, 32 bp, synthetic construct; identical to SEQ ID NO: 78
  source 1..32: mol_type = other DNA
  misc_feature 13..14: note = DNA
  misc_feature order(1..12,15..32): note = RNA
  modified_base 12: mod_base = OTHER; note = 2-Prime-O-Methoxyethyl modified 5-methyl Uridine
  modified_base 13: mod_base = OTHER; note = DNA nucleotide carrying a 6-amino-5-nitro-3-yl-2(1H)-pyridone nucleobase
  modified_base order(7,9,16,24..25,27): mod_base = OTHER; note = 2-Prime-Fluoro modified nucleoside
  modified_base order(1..6,8,10..11,15,17..23,26,28..32): mod_base = OTHER; note = 2-Prime-O-Methyl modified nucleoside
  modified_base order(1^2,31^32): mod_base = OTHER; note = (1,3-dimethylimidazolidin-2-ylidene) Phosphoramidate linkage
  modified_base order(2..14,15..31): mod_base = OTHER; note = Phosphorothioate linkage
  modified_base 14^15: mod_base = OTHER; note = Methylphosphonate linkage
  misc_feature 1..32: note = RM115044

SEQ ID NO: 400 - DNA, 32 bp, synthetic construct; identical to SEQ ID NO: 79
  source 1..32: mol_type = other DNA
  misc_feature 10..11: note = DNA
  misc_feature order(1..9,12..32): note = RNA
  modified_base 9: mod_base = OTHER; note = 2-Prime-O-Methoxyethyl modified 5-methyl Uridine
  modified_base 10: mod_base = OTHER; note = DNA nucleotide carrying a 6-amino-5-nitro-3-yl-2(1H)-pyridone nucleobase
  modified_base order(4,6,13,21..22,24): mod_base = OTHER; note = 2-Prime-Fluoro modified nucleoside
  modified_base order(1..3,5,7..8,12,14..20,23,25..32): mod_base = OTHER; note = 2-Prime-O-Methyl modified nucleoside
  modified_base order(1^2,31^32): mod_base = OTHER; note = (1,3-dimethylimidazolidin-2-ylidene) Phosphoramidate linkage
  modified_base order(2..11,12..31): mod_base = OTHER; note = Phosphorothioate linkage
  modified_base 11^12: mod_base = OTHER; note = Methylphosphonate linkage
  misc_feature 1..32: note = RM115045

SEQ ID NO: 401 - DNA, 32 bp, synthetic construct; identical to SEQ ID NO: 80
  source 1..32: mol_type = other DNA
  misc_feature 7..8: note = DNA
  misc_feature order(1..6,9..32): note = RNA
  modified_base 6: mod_base = OTHER; note = 2-Prime-O-Methoxyethyl modified 5-methyl Uridine
  modified_base 7: mod_base = OTHER; note = DNA nucleotide carrying a 6-amino-5-nitro-3-yl-2(1H)-pyridone nucleobase
  modified_base order(1,3,10,18..19,21): mod_base = OTHER; note = 2-Prime-Fluoro modified nucleoside
  modified_base order(2,4..5,9,11..17,20,22..32): mod_base = OTHER; note = 2-Prime-O-Methyl modified nucleoside
  modified_base order(1^2,31^32): mod_base = OTHER; note = (1,3-dimethylimidazolidin-2-ylidene) Phosphoramidate linkage
  modified_base order(2..8,9..31): mod_base = OTHER; note = Phosphorothioate linkage
  modified_base 8^9: mod_base = OTHER; note = Methylphosphonate linkage
  misc_feature 1..32: note = RM115046

SEQ ID NO: 402 - DNA, 23 bp, synthetic construct
  source 1..23: mol_type = other DNA
  misc_feature 15..16: note = DNA
  misc_feature order(1..14,17..23): note = RNA
  modified_base 14: mod_base = OTHER; note = 2-Prime-O-Methoxyethyl modified 5-methyl Uridine
  modified_base 15: mod_base = OTHER; note = DNA nucleotide carrying a 6-amino-5-nitro-3-yl-2(1H)-pyridone nucleobase
  modified_base order(3,5..6,18,21,23): mod_base = OTHER; note = 2-Prime-Fluoro modified nucleoside
  modified_base order(1..2,4,7..13,17,19..20,22): mod_base = OTHER; note = 2-Prime-O-Methyl modified nucleoside
  modified_base order(1^2,22^23): mod_base = OTHER; note = (1,3-dimethylimidazolidin-2-ylidene) Phosphoramidate linkage
  modified_base order(2..16,17..22): mod_base = OTHER; note = Phosphorothioate linkage
  modified_base 16^17: mod_base = OTHER; note = Methylphosphonate linkage
  misc_feature 1..23: note = RM115047
ttggcccttcgtctnatggacaa

SEQ ID NO: 403 - DNA, 32 bp, synthetic construct; identical to SEQ ID NO: 75
  source 1..32: mol_type = other DNA
  misc_feature 22..23: note = DNA
  misc_feature order(1..21,24..32): note = RNA
  modified_base 21: mod_base = OTHER; note = 2-Prime-O-Methoxyethyl modified 5-methyl Uridine
  modified_base 22: mod_base = OTHER; note = DNA nucleotide carrying a 6-amino-5-nitro-3-yl-2(1H)-pyridone nucleobase
  modified_base order(10,12..13,25,28,30): mod_base = OTHER; note = 2-Prime-Fluoro modified nucleoside
  modified_base order(1..9,11,14..20,24,26..27,29,31..32): mod_base = OTHER; note = 2-Prime-O-Methyl modified nucleoside
  modified_base order(1^2,31^32): mod_base = OTHER; note = (1,3-dimethylimidazolidin-2-ylidene) Phosphoramidate linkage
  modified_base order(2..23,24..31): mod_base = OTHER; note = Phosphorothioate linkage
  modified_base 23^24: mod_base = OTHER; note = Methylphosphonate linkage
  misc_feature 1..32: note = RM115048

SEQ ID NO: 404 - DNA, 32 bp, synthetic construct; identical to SEQ ID NO: 76
  source 1..32: mol_type = other DNA
  misc_feature 19..20: note = DNA
  misc_feature order(1..18,21..32): note = RNA
  modified_base 18: mod_base = OTHER; note = 2-Prime-O-Methoxyethyl modified 5-methyl Uridine
  modified_base 19: mod_base = OTHER; note = DNA nucleotide carrying a 6-amino-5-nitro-3-yl-2(1H)-pyridone nucleobase
  modified_base order(7,9..10,22,25,27): mod_base = OTHER; note = 2-Prime-Fluoro modified nucleoside
  modified_base order(1..6,8,11..17,21,23..24,26,28..32): mod_base = OTHER; note = 2-Prime-O-Methyl modified nucleoside
  modified_base order(1^2,31^32): mod_base = OTHER; note = (1,3-dimethylimidazolidin-2-ylidene) Phosphoramidate linkage
  modified_base order(2..20,21..31): mod_base = OTHER; note = Phosphorothioate linkage
  modified_base 20^21: mod_base = OTHER; note = Methylphosphonate linkage
  misc_feature 1..32: note = RM115049

SEQ ID NO: 405 - DNA, 32 bp, synthetic construct; identical to SEQ ID NO: 77
  source 1..32: mol_type = other DNA
  misc_feature 16..17: note = DNA
  misc_feature order(1..15,18..32): note = RNA
  modified_base 15: mod_base = OTHER; note = 2-Prime-O-Methoxyethyl modified 5-methyl Uridine
  modified_base 16: mod_base = OTHER; note = DNA nucleotide carrying a 6-amino-5-nitro-3-yl-2(1H)-pyridone nucleobase
  modified_base order(4,6..7,19,22,24): mod_base = OTHER; note = 2-Prime-Fluoro modified nucleoside
  modified_base order(1..3,5,8..14,18,20..21,23,25..32): mod_base = OTHER; note = 2-Prime-O-Methyl modified nucleoside
  modified_base order(1^2,31^32): mod_base = OTHER; note = (1,3-dimethylimidazolidin-2-ylidene) Phosphoramidate linkage
  modified_base order(2..17,18..31): mod_base = OTHER; note = Phosphorothioate linkage
  modified_base 17^18: mod_base = OTHER; note = Methylphosphonate linkage
  misc_feature 1..32: note = RM115050

SEQ ID NO: 406 - DNA, 32 bp, synthetic construct; identical to SEQ ID NO: 78
  source 1..32: mol_type = other DNA
  misc_feature 13..14: note = DNA
  misc_feature order(1..12,15..32): note = RNA
  modified_base 12: mod_base = OTHER; note = 2-Prime-O-Methoxyethyl modified 5-methyl Uridine
  modified_base 13: mod_base = OTHER; note = DNA nucleotide carrying a 6-amino-5-nitro-3-yl-2(1H)-pyridone nucleobase
  modified_base order(1,3..4,16,19,21): mod_base = OTHER; note = 2-Prime-Fluoro modified nucleoside
  modified_base order(2,5..11,15,17..18,20,22..32): mod_base = OTHER; note = 2-Prime-O-Methyl modified nucleoside
  modified_base order(1^2,31^32): mod_base = OTHER; note = (1,3-dimethylimidazolidin-2-ylidene) Phosphoramidate linkage
  modified_base order(2..14,15..31): mod_base = OTHER; note = Phosphorothioate linkage
  modified_base 14^15: mod_base = OTHER; note = Methylphosphonate linkage
  misc_feature 1..32: note = RM115051

SEQ ID NO: 407 - DNA, 32 bp, synthetic construct; identical to SEQ ID NO: 76
  source 1..32: mol_type = other DNA
  misc_feature 19..20: note = DNA
  misc_feature order(1..18,21..32): note = RNA
  modified_base 18: mod_base = OTHER; note = 2-Prime-O-Methoxyethyl modified 5-methyl Uridine
  modified_base 19: mod_base = OTHER; note = DNA nucleotide carrying a 6-amino-5-nitro-3-yl-2(1H)-pyridone nucleobase
  modified_base order(15,22,30): mod_base = OTHER; note = 2-Prime-Fluoro modified nucleoside
  modified_base order(1..14,16..17,21,23..29,31..32): mod_base = OTHER; note = 2-Prime-O-Methyl modified nucleoside
  modified_base order(1^2,31^32): mod_base = OTHER; note = (1,3-dimethylimidazolidin-2-ylidene) Phosphoramidate linkage
  modified_base order(2..20,21..31): mod_base = OTHER; note = Phosphorothioate linkage
  modified_base 20^21: mod_base = OTHER; note = Methylphosphonate linkage
  misc_feature 1..32: note = RM115052

SEQ ID NO: 408 - DNA, 32 bp, synthetic construct; identical to SEQ ID NO: 77
  source 1..32: mol_type = other DNA
  misc_feature 16..17: note = DNA
  misc_feature order(1..15,18..32): note = RNA
  modified_base 15: mod_base = OTHER; note = 2-Prime-O-Methoxyethyl modified 5-methyl Uridine
  modified_base 16: mod_base = OTHER; note = DNA nucleotide carrying a 6-amino-5-nitro-3-yl-2(1H)-pyridone nucleobase
  modified_base order(12,19,27): mod_base = OTHER; note = 2-Prime-Fluoro modified nucleoside
  modified_base order(1..11,13..14,18,20..26,28..32): mod_base = OTHER; note = 2-Prime-O-Methyl modified nucleoside
  modified_base order(1^2,31^32): mod_base = OTHER; note = (1,3-dimethylimidazolidin-2-ylidene) Phosphoramidate linkage
  modified_base order(2..17,18..31): mod_base = OTHER; note = Phosphorothioate linkage
  modified_base 17^18: mod_base = OTHER; note = Methylphosphonate linkage
  misc_feature 1..32: note = RM115053

SEQ ID NO: 409 - DNA, 32 bp, synthetic construct; identical to SEQ ID NO: 78
  source 1..32: mol_type = other DNA
  misc_feature 13..14: note = DNA
  misc_feature order(1..12,15..32): note = RNA
  modified_base 12: mod_base = OTHER; note = 2-Prime-O-Methoxyethyl modified 5-methyl Uridine
  modified_base 13: mod_base = OTHER; note = DNA nucleotide carrying a 6-amino-5-nitro-3-yl-2(1H)-pyridone nucleobase
  modified_base order(9,16,24): mod_base = OTHER; note = 2-Prime-Fluoro modified nucleoside
  modified_base order(1..8,10..11,15,17..23,25..32): mod_base = OTHER; note = 2-Prime-O-Methyl modified nucleoside
  modified_base order(1^2,31^32): mod_base = OTHER; note = (1,3-dimethylimidazolidin-2-ylidene) Phosphoramidate linkage
  modified_base order(2..14,15..31): mod_base = OTHER; note = Phosphorothioate linkage
  modified_base 14^15: mod_base = OTHER; note = Methylphosphonate linkage
  misc_feature 1..32: note = RM115054

SEQ ID NO: 410 - DNA, 32 bp, synthetic construct; identical to SEQ ID NO: 79
  source 1..32: mol_type = other DNA
  misc_feature 10..11: note = DNA
  misc_feature order(1..9,12..32): note = RNA
  modified_base 9: mod_base = OTHER; note = 2-Prime-O-Methoxyethyl modified 5-methyl Uridine
  modified_base 10: mod_base = OTHER; note = DNA nucleotide carrying a 6-amino-5-nitro-3-yl-2(1H)-pyridone nucleobase
  modified_base order(6,13,21): mod_base = OTHER; note = 2-Prime-Fluoro modified nucleoside
  modified_base order(1..5,7..8,12,14..20,22..32): mod_base = OTHER; note = 2-Prime-O-Methyl modified nucleoside
  modified_base order(1^2,31^32): mod_base = OTHER; note = (1,3-dimethylimidazolidin-2-ylidene) Phosphoramidate linkage
  modified_base order(2..11,12..31): mod_base = OTHER; note = Phosphorothioate linkage
  modified_base 11^12: mod_base = OTHER; note = Methylphosphonate linkage
  misc_feature 1..32: note = RM115055

SEQ ID NO: 411 - DNA, 32 bp, synthetic construct; identical to SEQ ID NO: 80
  source 1..32: mol_type = other DNA
  misc_feature 7..8: note = DNA
  misc_feature order(1..6,9..32): note = RNA
  modified_base 6: mod_base = OTHER; note = 2-Prime-O-Methoxyethyl modified 5-methyl Uridine
  modified_base 7: mod_base = OTHER; note = DNA nucleotide carrying a 6-amino-5-nitro-3-yl-2(1H)-pyridone nucleobase
  modified_base order(3,10,18): mod_base = OTHER; note = 2-Prime-Fluoro modified nucleoside
  modified_base order(1..2,4..5,9,11..17,19..32): mod_base = OTHER; note = 2-Prime-O-Methyl modified nucleoside
  modified_base order(1^2,31^32): mod_base = OTHER; note = (1,3-dimethylimidazolidin-2-ylidene) Phosphoramidate linkage
  modified_base order(2..8,9..31): mod_base = OTHER; note = Phosphorothioate linkage
  modified_base 8^9: mod_base = OTHER; note = Methylphosphonate linkage
  misc_feature 1..32: note = RM115056

SEQ ID NO: 412 - DNA, 32 bp, synthetic construct; identical to SEQ ID NO: 74
  source 1..32: mol_type = other DNA
  misc_feature 25..26: note = DNA
  misc_feature order(1..24,27..32): note = RNA
  modified_base 24: mod_base = OTHER; note = 2-Prime-O-Methoxyethyl modified 5-methyl Uridine
  modified_base 25: mod_base = OTHER; note = DNA nucleotide carrying a 6-amino-5-nitro-3-yl-2(1H)-pyridone nucleobase
  modified_base order(16,28,31): mod_base = OTHER; note = 2-Prime-Fluoro modified nucleoside
  modified_base order(1..15,17..23,27,29..30,32): mod_base = OTHER; note = 2-Prime-O-Methyl modified nucleoside
  modified_base order(1^2,31^32): mod_base = OTHER; note = (1,3-dimethylimidazolidin-2-ylidene) Phosphoramidate linkage
  modified_base order(2..26,27..31): mod_base = OTHER; note = Phosphorothioate linkage
  modified_base 26^27: mod_base = OTHER; note = Methylphosphonate linkage
  misc_feature 1..32: note = RM115057

SEQ ID NO: 413 - DNA, 32 bp, synthetic construct; identical to SEQ ID NO: 75
  source 1..32: mol_type = other DNA
  misc_feature 22..23: note = DNA
  misc_feature order(1..21,24..32): note = RNA
  modified_base 21: mod_base = OTHER; note = 2-Prime-O-Methoxyethyl modified 5-methyl Uridine
  modified_base 22: mod_base = OTHER; note = DNA nucleotide carrying a 6-amino-5-nitro-3-yl-2(1H)-pyridone nucleobase
  modified_base order(13,25,28): mod_base = OTHER; note = 2-Prime-Fluoro modified nucleoside
  modified_base order(1..12,14..20,24,26..27,29..32): mod_base = OTHER; note = 2-Prime-O-Methyl modified nucleoside
  modified_base order(1^2,31^32): mod_base = OTHER; note = (1,3-dimethylimidazolidin-2-ylidene) Phosphoramidate linkage
  modified_base order(2..23,24..31): mod_base = OTHER; note = Phosphorothioate linkage
  modified_base 23^24: mod_base = OTHER; note = Methylphosphonate linkage
  misc_feature 1..32: note = RM115058

SEQ ID NO: 414 - DNA, 32 bp, synthetic construct; identical to SEQ ID NO: 76
  source 1..32: mol_type = other DNA
  misc_feature 19..20: note = DNA
  misc_feature order(1..18,21..32): note = RNA
  modified_base 18: mod_base = OTHER; note = 2-Prime-O-Methoxyethyl modified 5-methyl Uridine
  modified_base 19: mod_base = OTHER; note = DNA nucleotide carrying a 6-amino-5-nitro-3-yl-2(1H)-pyridone nucleobase
  modified_base order(10,22,25): mod_base = OTHER; note = 2-Prime-Fluoro modified nucleoside
  modified_base order(1..9,11..17,21,23..24,26..32): mod_base = OTHER; note = 2-Prime-O-Methyl modified nucleoside
  modified_base order(1^2,31^32): mod_base = OTHER; note = (1,3-dimethylimidazolidin-2-ylidene) Phosphoramidate linkage
  modified_base order(2..20,21..31): mod_base = OTHER; note = Phosphorothioate linkage
  modified_base 20^21: mod_base = OTHER; note = Methylphosphonate linkage
  misc_feature 1..32: note = RM115059

SEQ ID NO: 415 - DNA, 32 bp, synthetic construct; identical to SEQ ID NO: 77
  source 1..32: mol_type = other DNA
  misc_feature 16..17: note = DNA
  misc_feature order(1..15,18..32): note = RNA
  modified_base 15: mod_base = OTHER; note = 2-Prime-O-Methoxyethyl modified 5-methyl Uridine
  modified_base 16: mod_base = OTHER; note = DNA nucleotide carrying a 6-amino-5-nitro-3-yl-2(1H)-pyridone nucleobase
  modified_base order(7,19,22): mod_base = OTHER; note = 2-Prime-Fluoro modified nucleoside
  modified_base order(1..6,8..14,18,20..21,23..32): mod_base = OTHER; note = 2-Prime-O-Methyl modified nucleoside
  modified_base order(1^2,31^32): mod_base = OTHER; note = (1,3-dimethylimidazolidin-2-ylidene) Phosphoramidate linkage
  modified_base order(2..17,18..31): mod_base = OTHER; note = Phosphorothioate linkage
  modified_base 17^18: mod_base = OTHER; note = Methylphosphonate linkage
  misc_feature 1..32: note = RM115060

SEQ ID NO: 416 - DNA, 32 bp, synthetic construct; identical to SEQ ID NO: 78
  source 1..32: mol_type = other DNA
  misc_feature 13..14: note = DNA
  misc_feature order(1..12,15..32): note = RNA
  modified_base 12: mod_base = OTHER; note = 2-Prime-O-Methoxyethyl modified 5-methyl Uridine
  modified_base 13: mod_base = OTHER; note = DNA nucleotide carrying a 6-amino-5-nitro-3-yl-2(1H)-pyridone nucleobase
  modified_base order(4,16,19): mod_base = OTHER; note = 2-Prime-Fluoro modified nucleoside
  modified_base order(1..3,5..11,15,17..18,20..32): mod_base = OTHER; note = 2-Prime-O-Methyl modified nucleoside
  modified_base order(1^2,31^32): mod_base = OTHER; note = (1,3-dimethylimidazolidin-2-ylidene) Phosphoramidate linkage
  modified_base order(2..14,15..31): mod_base = OTHER; note = Phosphorothioate linkage
  modified_base 14^15: mod_base = OTHER; note = Methylphosphonate linkage
  misc_feature 1..32: note = RM115061

SEQ ID NO: 417 - DNA, 32 bp, synthetic construct; identical to SEQ ID NO: 79
  source 1..32: mol_type = other DNA
  misc_feature 10..11: note = DNA
  misc_feature order(1..9,12..32): note = RNA
  modified_base 9: mod_base = OTHER; note = 2-Prime-O-Methoxyethyl modified 5-methyl Uridine
  modified_base 10: mod_base = OTHER; note = DNA nucleotide carrying a 6-amino-5-nitro-3-yl-2(1H)-pyridone nucleobase
  modified_base order(1,13,16): mod_base = OTHER; note = 2-Prime-Fluoro modified nucleoside
  modified_base order(2..8,12,14..15,17..32): mod_base = OTHER; note = 2-Prime-O-Methyl modified nucleoside
  modified_base order(1^2,31^32): mod_base = OTHER; note = (1,3-dimethylimidazolidin-2-ylidene) Phosphoramidate linkage
  modified_base order(2..11,12..31): mod_base = OTHER; note = Phosphorothioate linkage
  modified_base 11^12: mod_base = OTHER; note = Methylphosphonate linkage
  misc_feature 1..32: note = RM115062

SEQ ID NO: 418 - DNA, 29 bp, synthetic construct
  source 1..29: mol_type = other DNA
  misc_feature 18..19: note = DNA
  misc_feature order(1..17,20..29): note = RNA
  modified_base 17: mod_base = OTHER; note = 2-Prime-O-Methoxyethyl modified 5-methyl Uridine
  modified_base 18: mod_base = OTHER; note = DNA nucleotide carrying a 6-amino-5-nitro-3-yl-2(1H)-pyridone nucleobase
  modified_base order(5,9,11,16,21,23..24,27): mod_base = OTHER; note = 2-Prime-Fluoro modified nucleoside
  modified_base order(1..4,6..8,10,12..15,20,22,25..26,28..29): mod_base = OTHER; note = 2-Prime-O-Methyl modified nucleoside
  modified_base order(1^2,28^29): mod_base = OTHER; note = (1,3-dimethylimidazolidin-2-ylidene) Phosphoramidate linkage
  modified_base order(2..19,20..28): mod_base = OTHER; note = Phosphorothioate linkage
  modified_base 19^20: mod_base = OTHER; note = Methylphosphonate linkage
  misc_feature 1..29: note = RM115063
aatttggcccttcgtctnatggacaaagt

SEQ ID NO: 419 - DNA, 29 bp, synthetic construct
  source 1..29: mol_type = other DNA
  misc_feature 15..16: note = DNA
  misc_feature order(1..14,17..29): note = RNA
  modified_base 14: mod_base = OTHER; note = 2-Prime-O-Methoxyethyl modified 5-methyl Uridine
  modified_base 15: mod_base = OTHER; note = DNA nucleotide carrying a 6-amino-5-nitro-3-yl-2(1H)-pyridone nucleobase
  modified_base order(2,6,8,13,18,20..21,24): mod_base = OTHER; note = 2-Prime-Fluoro modified nucleoside
  modified_base order(1,3..5,7,9..12,17,19,22..23,25..29): mod_base = OTHER; note = 2-Prime-O-Methyl modified nucleoside
  modified_base order(1^2,28^29): mod_base = OTHER; note = (1,3-dimethylimidazolidin-2-ylidene) Phosphoramidate linkage
  modified_base order(2..16,17..28): mod_base = OTHER; note = Phosphorothioate linkage
  modified_base 16^17: mod_base = OTHER; note = Methylphosphonate linkage
  misc_feature 1..29: note = RM115064
ttggcccttcgtctnatggacaaagtctt

SEQ ID NO: 420 - DNA, 29 bp, synthetic construct
  source 1..29: mol_type = other DNA
  misc_feature 12..13: note = DNA
  misc_feature order(1..11,14..29): note = RNA
  modified_base 11: mod_base = OTHER; note = 2-Prime-O-Methoxyethyl modified 5-methyl Uridine
  modified_base 12: mod_base = OTHER; note = DNA nucleotide carrying a 6-amino-5-nitro-3-yl-2(1H)-pyridone nucleobase
  modified_base order(5,8..9,15..16,21,23,27): mod_base = OTHER; note = 2-Prime-Fluoro modified nucleoside
  modified_base order(1..4,6..7,10,14,17..20,22,24..26,28..29): mod_base = OTHER; note = 2-Prime-O-Methyl modified nucleoside
  modified_base order(1^2,28^29): mod_base = OTHER; note = (1,3-dimethylimidazolidin-2-ylidene) Phosphoramidate linkage
  modified_base order(2..13,14..28): mod_base = OTHER; note = Phosphorothioate linkage
  modified_base 13^14: mod_base = OTHER; note = Methylphosphonate linkage
  misc_feature 1..29: note = RM115065
gcccttcgtctnatggacaaagtctttaa

SEQ ID NO: 421 - DNA, 29 bp, synthetic construct
  source 1..29: mol_type = other DNA
  misc_feature 9..10: note = DNA
  misc_feature order(1..8,11..29): note = RNA
  modified_base 8: mod_base = OTHER; note = 2-Prime-O-Methoxyethyl modified 5-methyl Uridine
  modified_base 9: mod_base = OTHER; note = DNA nucleotide carrying a 6-amino-5-nitro-3-yl-2(1H)-pyridone nucleobase
  modified_base order(2,5..6,12..13,18,20,24): mod_base = OTHER; note = 2-Prime-Fluoro modified nucleoside
  modified_base order(1,3..4,7,11,14..17,19,21..23,25..29): mod_base = OTHER; note = 2-Prime-O-Methyl modified nucleoside
  modified_base order(1^2,28^29): mod_base = OTHER; note = (1,3-dimethylimidazolidin-2-ylidene) Phosphoramidate linkage
  modified_base order(2..10,11..28): mod_base = OTHER; note = Phosphorothioate linkage
  modified_base 10^11: mod_base = OTHER; note = Methylphosphonate linkage
  misc_feature 1..29: note = RM115066
cttcgtctnatggacaaagtctttaagac

SEQ ID NO: 422 - DNA, 26 bp, synthetic construct
  source 1..26: mol_type = other DNA
  misc_feature 22..23: note = DNA
  misc_feature order(1..21,24..26): note = RNA
  modified_base 21: mod_base = OTHER; note = 2-Prime-O-Methoxyethyl modified 5-methyl Uridine
  modified_base 22: mod_base = OTHER; note = DNA nucleotide carrying a 6-amino-5-nitro-3-yl-2(1H)-pyridone nucleobase
  modified_base order(9,13,15,20,25): mod_base = OTHER; note = 2-Prime-Fluoro modified nucleoside
  modified_base order(1..8,10..12,14,16..19,24,26): mod_base = OTHER; note = 2-Prime-O-Methyl modified nucleoside
  modified_base order(1^2,25^26): mod_base = OTHER; note = (1,3-dimethylimidazolidin-2-ylidene) Phosphoramidate linkage
  modified_base order(2..23,24^25): mod_base = OTHER; note = Phosphorothioate linkage
  modified_base 23^24: mod_base = OTHER; note = Methylphosphonate linkage
  misc_feature 1..26: note = RM115067
cattaatttggcccttcgtctnatgg

SEQ ID NO: 423 - DNA, 26 bp, synthetic construct
  source 1..26: mol_type = other DNA
  misc_feature 19..20: note = DNA
  misc_feature order(1..18,21..26): note = RNA
  modified_base 18: mod_base = OTHER; note = 2-Prime-O-Methoxyethyl modified 5-methyl Uridine
  modified_base 19: mod_base = OTHER; note = DNA nucleotide carrying a 6-amino-5-nitro-3-yl-2(1H)-pyridone nucleobase
  modified_base order(6,10,12,17,22): mod_base = OTHER; note = 2-Prime-Fluoro modified nucleoside
  modified_base order(1..5,7..9,11,13..16,21,23..26): mod_base = OTHER; note = 2-Prime-O-Methyl modified nucleoside
  modified_base order(1^2,25^26): mod_base = OTHER; note = (1,3-dimethylimidazolidin-2-ylidene) Phosphoramidate linkage
  modified_base order(2..20,21..25): mod_base = OTHER; note = Phosphorothioate linkage
  modified_base 20^21: mod_base = OTHER; note = Methylphosphonate linkage
  misc_feature 1..26: note = RM115068
taatttggcccttcgtctnatggaca

SEQ ID NO: 424 - DNA, 26 bp, synthetic construct
  source 1..26: mol_type = other DNA
  misc_feature 16..17: note = DNA
  misc_feature order(1..15,18..26): note = RNA
  modified_base 15: mod_base = OTHER; note = 2-Prime-O-Methoxyethyl modified 5-methyl Uridine
  modified_base 16: mod_base = OTHER; note = DNA nucleotide carrying a 6-amino-5-nitro-3-yl-2(1H)-pyridone nucleobase
  modified_base order(3,7,9,14,19): mod_base = OTHER; note = 2-Prime-Fluoro modified nucleoside
  modified_base order(1..2,4..6,8,10..13,18,20..26): mod_base = OTHER; note = 2-Prime-O-Methyl modified nucleoside
  modified_base order(1^2,25^26): mod_base = OTHER; note = (1,3-dimethylimidazolidin-2-ylidene) Phosphoramidate linkage
  modified_base order(2..17,18..25): mod_base = OTHER; note = Phosphorothioate linkage
  modified_base 17^18: mod_base = OTHER; note = Methylphosphonate linkage
  misc_feature 1..26: note = RM115069
tttggcccttcgtctnatggacaaag

SEQ ID NO: 425 - DNA, 29 bp, synthetic construct
  source 1..29: mol_type = other DNA
  misc_feature 24..25: note = DNA
  misc_feature order(1..23,26..29): note = RNA
  modified_base 23: mod_base = OTHER; note = 2-Prime-O-Methoxyethyl modified 5-methyl Uridine
  modified_base 24: mod_base = OTHER; note = DNA nucleotide carrying a 6-amino-5-nitro-3-yl-2(1H)-pyridone nucleobase
  modified_base order(11,15,17,22,27): mod_base = OTHER; note = 2-Prime-Fluoro modified nucleoside
  modified_base order(1..10,12..14,16,18..21,26,28..29): mod_base = OTHER; note = 2-Prime-O-Methyl modified nucleoside
  modified_base order(1^2,28^29): mod_base = OTHER; note = (1,3-dimethylimidazolidin-2-ylidene) Phosphoramidate linkage
  modified_base order(2..25,26..28): mod_base = OTHER; note = Phosphorothioate linkage
  modified_base 25^26: mod_base = OTHER; note = Methylphosphonate linkage
  misc_feature 1..29: note = RM115070
gtcattaatttggcccttcgtctnatgga

SEQ ID NO: 426 - DNA, 29 bp, synthetic construct
  source 1..29: mol_type = other DNA
  misc_feature 21..22: note = DNA
  misc_feature order(1..20,23..29): note = RNA
  modified_base 20: mod_base = OTHER; note = 2-Prime-O-Methoxyethyl modified 5-methyl Uridine
  modified_base 21: mod_base = OTHER; note = DNA nucleotide carrying a 6-amino-5-nitro-3-yl-2(1H)-pyridone nucleobase
  modified_base order(8,12,14,19,24): mod_base = OTHER; note = 2-Prime-Fluoro modified nucleoside
  modified_base order(1..7,9..11,13,15..18,23,25..29): mod_base = OTHER; note = 2-Prime-O-Methyl modified nucleoside
  modified_base order(1^2,28^29): mod_base = OTHER; note = (1,3-dimethylimidazolidin-2-ylidene) Phosphoramidate linkage
  modified_base order(2..22,23..28): mod_base = OTHER; note = Phosphorothioate linkage
  modified_base 22^23: mod_base = OTHER; note = Methylphosphonate linkage
  misc_feature 1..29: note = RM115071
attaatttggcccttcgtctnatggacaa

SEQ ID NO: 427 - DNA, 29 bp, synthetic construct
  source 1..29: mol_type = other DNA
  misc_feature 18..19: note = DNA
  misc_feature order(1..17,20..29): note = RNA
  modified_base 17: mod_base = OTHER; note = 2-Prime-O-Methoxyethyl modified 5-methyl Uridine
  modified_base 18: mod_base = OTHER; note = DNA nucleotide carrying a 6-amino-5-nitro-3-yl-2(1H)-pyridone nucleobase
  modified_base order(5,9,11,16,21): mod_base = OTHER; note = 2-Prime-Fluoro modified nucleoside
  modified_base order(1..4,6..8,10,12..15,20,22..29): mod_base = OTHER; note = 2-Prime-O-Methyl modified nucleoside
  modified_base order(1^2,28^29): mod_base = OTHER; note = (1,3-dimethylimidazolidin-2-ylidene) Phosphoramidate linkage
  modified_base order(2..19,20..28): mod_base = OTHER; note = Phosphorothioate linkage
  modified_base 19^20: mod_base = OTHER; note = Methylphosphonate linkage
  misc_feature 1..29: note = RM115072
aatttggcccttcgtctnatggacaaagt

SEQ ID NO: 428 - DNA, 29 bp, synthetic construct
  source 1..29: mol_type = other DNA
  misc_feature 15..16: note = DNA
  misc_feature order(1..14,17..29): note = RNA
  modified_base 14: mod_base = OTHER; note = 2-Prime-O-Methoxyethyl modified 5-methyl Uridine
  modified_base 15: mod_base = OTHER; note = DNA nucleotide carrying a 6-amino-5-nitro-3-yl-2(1H)-pyridone nucleobase
  modified_base order(2,6,8,13,18): mod_base = OTHER; note = 2-Prime-Fluoro modified nucleoside
  modified_base order(1,3..5,7,9..12,17,19..29): mod_base = OTHER; note = 2-Prime-O-Methyl modified nucleoside
  modified_base order(1^2,28^29): mod_base = OTHER; note = (1,3-dimethylimidazolidin-2-ylidene) Phosphoramidate linkage
  modified_base order(2..16,17..28): mod_base = OTHER; note = Phosphorothioate linkage
  modified_base 16^17: mod_base = OTHER; note = Methylphosphonate linkage
  misc_feature 1..29: note = RM115073
ttggcccttcgtctnatggacaaagtctt

SEQ ID NO: 429 - DNA, 29 bp, synthetic construct
  source 1..29: mol_type = other DNA
  misc_feature 9..10: note = DNA
  misc_feature order(1..8,11..29): note = RNA
  modified_base 8: mod_base = OTHER; note = 2-Prime-O-Methoxyethyl modified 5-methyl Uridine
  modified_base 9: mod_base = OTHER; note = DNA nucleotide carrying a 6-amino-5-nitro-3-yl-2(1H)-pyridone nucleobase
  modified_base order(3,12,15,17,19,26..27,29): mod_base = OTHER; note = 2-Prime-Fluoro modified nucleoside
  modified_base order(1..2,4..7,11,13..14,16,18,20..25,28): mod_base = OTHER; note = 2-Prime-O-Methyl modified nucleoside
  modified_base order(1^2,28^29): mod_base = OTHER; note = (1,3-dimethylimidazolidin-2-ylidene) Phosphoramidate linkage
  modified_base order(2..10,11..28): mod_base = OTHER; note = Phosphorothioate linkage
  modified_base 10^11: mod_base = OTHER; note = Methylphosphonate linkage
  misc_feature 1..29: note = RM115074
cttcgtctnatggacaaagtctttaagac

SEQ ID NO: 430 - DNA, 29 bp, synthetic construct
  source 1..29: mol_type = other DNA
  misc_feature 21..22: note = DNA
  misc_feature order(1..20,23..29): note = RNA
  modified_base 20: mod_base = OTHER; note = 2-Prime-O-Methoxyethyl modified 5-methyl Uridine
  modified_base 21: mod_base = OTHER; note = DNA nucleotide carrying a 6-amino-5-nitro-3-yl-2(1H)-pyridone nucleobase
  modified_base order(3,5..6,13,15,17,24,29): mod_base = OTHER; note = 2-Prime-Fluoro modified nucleoside
  modified_base order(1..2,4,7..12,14,16,18..19,23,25..28): mod_base = OTHER; note = 2-Prime-O-Methyl modified nucleoside
  modified_base order(1^2,28^29): mod_base = OTHER; note = (1,3-dimethylimidazolidin-2-ylidene) Phosphoramidate linkage
  modified_base order(2..22,23..28): mod_base = OTHER; note = Phosphorothioate linkage
  modified_base 22^23: mod_base = OTHER; note = Methylphosphonate linkage
  misc_feature 1..29: note = RM115075
attaatttggcccttcgtctnatggacaa

SEQ ID NO: 431 - DNA, 26 bp, synthetic construct
  source 1..26: mol_type = other DNA
  misc_feature 16..17: note = DNA
  misc_feature order(1..15,18..26): note = RNA
  modified_base 15: mod_base = OTHER; note = 2-Prime-O-Methoxyethyl modified 5-methyl Uridine
  modified_base 16: mod_base = OTHER; note = DNA nucleotide carrying a 6-amino-5-nitro-3-yl-2(1H)-pyridone nucleobase
  modified_base order(10,19,22,24,26): mod_base = OTHER; note = 2-Prime-Fluoro modified nucleoside
  modified_base order(1..9,11..14,18,20..21,23,25): mod_base = OTHER; note = 2-Prime-O-Methyl modified nucleoside
  modified_base order(1^2,25^26): mod_base = OTHER; note = (1,3-dimethylimidazolidin-2-ylidene) Phosphoramidate linkage
  modified_base order(2..17,18..25): mod_base = OTHER; note = Phosphorothioate linkage
  modified_base 17^18: mod_base = OTHER; note = Methylphosphonate linkage
  misc_feature 1..26: note = RM115076
tttggcccttcgtctnatggacaaag

SEQ ID NO: 432 - DNA, 26 bp, synthetic construct
  source 1..26: mol_type = other DNA
  misc_feature 13..14: note = DNA
  misc_feature order(1..12,15..26): note = RNA
  modified_base 12: mod_base = OTHER; note = 2-Prime-O-Methoxyethyl modified 5-methyl Uridine
  modified_base 13: mod_base = OTHER; note = DNA nucleotide carrying a 6-amino-5-nitro-3-yl-2(1H)-pyridone nucleobase
  modified_base order(7,16,19,21,23): mod_base = OTHER; note = 2-Prime-Fluoro modified nucleoside
  modified_base order(1..6,8..11,15,17..18,20,22,24..26): mod_base = OTHER; note = 2-Prime-O-Methyl modified nucleoside
  modified_base order(1^2,25^26): mod_base = OTHER; note = (1,3-dimethylimidazolidin-2-ylidene) Phosphoramidate linkage
  modified_base order(2..14,15..25): mod_base = OTHER; note = Phosphorothioate linkage
  modified_base 14^15: mod_base = OTHER; note = Methylphosphonate linkage
  misc_feature 1..26: note = RM115077
ggcccttcgtctnatggacaaagtct

SEQ ID NO: 433 - DNA, 26 bp, synthetic construct
  source 1..26: mol_type = other DNA
  misc_feature 10..11: note = DNA
  misc_feature order(1..9,12..26): note = RNA
  modified_base 9: mod_base = OTHER; note = 2-Prime-O-Methoxyethyl modified 5-methyl Uridine
  modified_base 10: mod_base = OTHER; note = DNA nucleotide carrying a 6-amino-5-nitro-3-yl-2(1H)-pyridone nucleobase
  modified_base order(4,13,16,18,20): mod_base = OTHER; note = 2-Prime-Fluoro modified nucleoside
  modified_base order(1..3,5..8,12,14..15,17,19,21..26): mod_base = OTHER; note = 2-Prime-O-Methyl modified nucleoside
  modified_base order(1^2,25^26): mod_base = OTHER; note = (1,3-dimethylimidazolidin-2-ylidene) Phosphoramidate linkage
  modified_base order(2..11,12..25): mod_base = OTHER; note = Phosphorothioate linkage
  modified_base 11^12: mod_base = OTHER; note = Methylphosphonate linkage
  misc_feature 1..26: note = RM115078
ccttcgtctnatggacaaagtcttta

SEQ ID NO: 434 - DNA, 26 bp, synthetic construct
  source 1..26: mol_type = other DNA
  misc_feature 7..8: note = DNA
  misc_feature order(1..6,9..26): note = RNA
  modified_base 6: mod_base = OTHER; note = 2-Prime-O-Methoxyethyl modified 5-methyl Uridine
  modified_base 7: mod_base = OTHER; note = DNA nucleotide carrying a 6-amino-5-nitro-3-yl-2(1H)-pyridone nucleobase
  modified_base order(1,10,13,15,17): mod_base = OTHER; note = 2-Prime-Fluoro modified nucleoside
  modified_base order(2..5,9,11..12,14,16,18..26): mod_base = OTHER; note = 2-Prime-O-Methyl modified nucleoside
  modified_base order(1^2,25^26): mod_base = OTHER; note = (1,3-dimethylimidazolidin-2-ylidene) Phosphoramidate linkage
  modified_base order(2..8,9..25): mod_base = OTHER; note = Phosphorothioate linkage
  modified_base 8^9: mod_base = OTHER; note = Methylphosphonate linkage
  misc_feature 1..26: note = RM115079
tcgtctnatggacaaagtctttaaga

SEQ ID NO: 435 - DNA, 29 bp, synthetic construct
  source 1..29: mol_type = other DNA
  misc_feature 18..19: note = DNA
  misc_feature order(1..17,20..29): note = RNA
  modified_base 17: mod_base = OTHER; note = 2-Prime-O-Methoxyethyl modified 5-methyl Uridine
  modified_base 18: mod_base = OTHER; note = DNA nucleotide carrying a 6-amino-5-nitro-3-yl-2(1H)-pyridone nucleobase
  modified_base order(12,21,24,26,28): mod_base = OTHER; note = 2-Prime-Fluoro modified nucleoside
  modified_base order(1..11,13..16,20,22..23,25,27,29): mod_base = OTHER; note = 2-Prime-O-Methyl modified nucleoside
  modified_base order(1^2,28^29): mod_base = OTHER; note = (1,3-dimethylimidazolidin-2-ylidene) Phosphoramidate linkage
  modified_base order(2..19,20..28): mod_base = OTHER; note = Phosphorothioate linkage
  modified_base 19^20: mod_base = OTHER; note = Methylphosphonate linkage
  misc_feature 1..29: note = RM115080
aatttggcccttcgtctnatggacaaagt

SEQ ID NO: 436 - DNA, 29 bp, synthetic construct
  source 1..29: mol_type = other DNA
  misc_feature 15..16: note = DNA
  misc_feature order(1..14,17..29): note = RNA
  modified_base 14: mod_base = OTHER; note = 2-Prime-O-Methoxyethyl modified 5-methyl Uridine
  modified_base 15: mod_base = OTHER; note = DNA nucleotide carrying a 6-amino-5-nitro-3-yl-2(1H)-pyridone nucleobase
  modified_base order(9,18,21,23,25): mod_base = OTHER; note = 2-Prime-Fluoro modified nucleoside
  modified_base order(1..8,10..13,17,19..20,22,24,26..29): mod_base = OTHER; note = 2-Prime-O-Methyl modified nucleoside
  modified_base order(1^2,28^29): mod_base = OTHER; note = (1,3-dimethylimidazolidin-2-ylidene) Phosphoramidate linkage
  modified_base order(2..16,17..28): mod_base = OTHER; note = Phosphorothioate linkage
  modified_base 16^17: mod_base = OTHER; note = Methylphosphonate linkage
  misc_feature 1..29: note = RM115081
ttggcccttcgtctnatggacaaagtctt

SEQ ID NO: 437 - DNA, 29 bp, synthetic construct
  source 1..29: mol_type = other DNA
  misc_feature 12..13: note = DNA
  misc_feature order(1..11,14..29): note = RNA
  modified_base 11: mod_base = OTHER; note = 2-Prime-O-Methoxyethyl modified 5-methyl Uridine
  modified_base 12: mod_base = OTHER; note = DNA nucleotide carrying a 6-amino-5-nitro-3-yl-2(1H)-pyridone nucleobase
  modified_base order(6,15,18,20,22): mod_base = OTHER; note = 2-Prime-Fluoro modified nucleoside
  modified_base order(1..5,7..10,14,16..17,19,21,23..29): mod_base = OTHER; note = 2-Prime-O-Methyl modified nucleoside
  modified_base order(1^2,28^29): mod_base = OTHER; note = (1,3-dimethylimidazolidin-2-ylidene) Phosphoramidate linkage
  modified_base order(2..13,14..28): mod_base = OTHER; note = Phosphorothioate linkage
  modified_base 13^14: mod_base = OTHER; note = Methylphosphonate linkage
  misc_feature 1..29: note = RM115082
gcccttcgtctnatggacaaagtctttaa

SEQ ID NO: 438 - DNA, 29 bp, synthetic construct
  source 1..29: mol_type = other DNA
  misc_feature 9..10: note = DNA
  misc_feature order(1..8,11..29): note = RNA
  modified_base 8: mod_base = OTHER; note = 2-Prime-O-Methoxyethyl modified 5-methyl Uridine
  modified_base 9: mod_base = OTHER; note = DNA nucleotide carrying a 6-amino-5-nitro-3-yl-2(1H)-pyridone nucleobase
  modified_base order(3,12,15,17,19): mod_base = OTHER; note = 2-Prime-Fluoro modified nucleoside
  modified_base order(1..2,4..7,11,13..14,16,18,20..29): mod_base = OTHER; note = 2-Prime-O-Methyl modified nucleoside
  modified_base order(1^2,28^29): mod_base = OTHER; note = (1,3-dimethylimidazolidin-2-ylidene) Phosphoramidate linkage
  modified_base order(2..10,11..28): mod_base = OTHER; note = Phosphorothioate linkage
  modified_base 10^11: mod_base = OTHER; note = Methylphosphonate linkage
  misc_feature 1..29: note = RM115083
cttcgtctnatggacaaagtctttaagac

SEQ ID NO: 439 - DNA, 26 bp, synthetic construct
  source 1..26: mol_type = other DNA
  misc_feature 16..17: note = DNA
  misc_feature order(1..15,18..26): note = RNA
  modified_base 15: mod_base = OTHER; note = 2-Prime-O-Methoxyethyl modified 5-methyl Uridine
  modified_base 16: mod_base = OTHER; note = DNA nucleotide carrying a 6-amino-5-nitro-3-yl-2(1H)-pyridone nucleobase
  modified_base order(8,10,12,19,24): mod_base = OTHER; note = 2-Prime-Fluoro modified nucleoside
  modified_base order(1..7,9,11,13..14,18,20..23,25..26): mod_base = OTHER; note = 2-Prime-O-Methyl modified nucleoside
  modified_base order(1^2,25^26): mod_base = OTHER; note = (1,3-dimethylimidazolidin-2-ylidene) Phosphoramidate linkage
  modified_base order(2..17,18..25): mod_base = OTHER; note = Phosphorothioate linkage
  modified_base 17^18: mod_base = OTHER; note = Methylphosphonate linkage
  misc_feature 1..26: note = RM115084
tttggcccttcgtctnatggacaaag

SEQ ID NO: 440 - DNA, 26 bp, synthetic construct
  source 1..26: mol_type = other DNA
  misc_feature 13..14: note = DNA
  misc_feature order(1..12,15..26): note = RNA
  modified_base 12: mod_base = OTHER; note = 2-Prime-O-Methoxyethyl modified 5-methyl Uridine
  modified_base 13: mod_base = OTHER; note = DNA nucleotide carrying a 6-amino-5-nitro-3-yl-2(1H)-pyridone nucleobase
  modified_base order(5,7,9,16,21): mod_base = OTHER; note = 2-Prime-Fluoro modified nucleoside
  modified_base order(1..4,6,8,10..11,15,17..20,22..26): mod_base = OTHER; note = 2-Prime-O-Methyl modified nucleoside
  modified_base order(1^2,25^26): mod_base = OTHER; note = (1,3-dimethylimidazolidin-2-ylidene) Phosphoramidate linkage
  modified_base order(2..14,15..25): mod_base = OTHER; note = Phosphorothioate linkage
  modified_base 14^15: mod_base = OTHER; note = Methylphosphonate linkage
  misc_feature 1..26: note = RM115085
ggcccttcgtctnatggacaaagtct

SEQ ID NO: 441 - DNA, 26 bp, synthetic construct
  source 1..26: mol_type = other DNA
  misc_feature 10..11: note = DNA
  misc_feature order(1..9,12..26): note = RNA
  modified_base 9: mod_base = OTHER; note = 2-Prime-O-Methoxyethyl modified 5-methyl Uridine
  modified_base 10: mod_base = OTHER; note = DNA nucleotide carrying a 6-amino-5-nitro-3-yl-2(1H)-pyridone nucleobase
  modified_base order(2,4,6,13,18): mod_base = OTHER; note = 2-Prime-Fluoro modified nucleoside
  modified_base order(1,3,5,7..8,12,14..17,19..26): mod_base = OTHER; note = 2-Prime-O-Methyl modified nucleoside
  modified_base order(1^2,25^26): mod_base = OTHER; note = (1,3-dimethylimidazolidin-2-ylidene) Phosphoramidate linkage
  modified_base order(2..11,12..25): mod_base = OTHER; note = Phosphorothioate linkage
  modified_base 11^12: mod_base = OTHER; note = Methylphosphonate linkage
  misc_feature 1..26: note = RM115086
ccttcgtctnatggacaaagtcttta

SEQ ID NO: 442 - DNA, 29 bp, synthetic construct
  source 1..29: mol_type = other DNA
  misc_feature 21..22: note = DNA
  misc_feature order(1..20,23..29): note = RNA
  modified_base 20: mod_base = OTHER; note = 2-Prime-O-Methoxyethyl modified 5-methyl Uridine
  modified_base 21: mod_base = OTHER; note = DNA nucleotide carrying a 6-amino-5-nitro-3-yl-2(1H)-pyridone nucleobase
  modified_base order(13,15,17,24,29): mod_base = OTHER; note = 2-Prime-Fluoro modified nucleoside
  modified_base order(1..12,14,16,18..19,23,25..28): mod_base = OTHER; note = 2-Prime-O-Methyl modified nucleoside
  modified_base order(1^2,28^29): mod_base = OTHER; note = (1,3-dimethylimidazolidin-2-ylidene) Phosphoramidate linkage
  modified_base order(2..22,23..28): mod_base = OTHER; note = Phosphorothioate linkage
  modified_base 22^23: mod_base = OTHER; note = Methylphosphonate linkage
  misc_feature 1..29: note = RM115087
attaatttggcccttcgtctnatggacaa

SEQ ID NO: 443 - DNA, 29 bp, synthetic construct
  source 1..29: mol_type = other DNA
  misc_feature 18..19: note = DNA
  misc_feature order(1..17,20..29): note = RNA
  modified_base 17: mod_base = OTHER; note = 2-Prime-O-Methoxyethyl modified 5-methyl Uridine
  modified_base 18: mod_base = OTHER; note = DNA nucleotide carrying a 6-amino-5-nitro-3-yl-2(1H)-pyridone nucleobase
  modified_base order(10,12,14,21,26): mod_base = OTHER; note = 2-Prime-Fluoro modified nucleoside
  modified_base order(1..9,11,13,15..16,20,22..25,27..29): mod_base = OTHER; note = 2-Prime-O-Methyl modified nucleoside
  modified_base order(1^2,28^29): mod_base = OTHER; note = (1,3-dimethylimidazolidin-2-ylidene) Phosphoramidate linkage
  modified_base order(2..19,20..28): mod_base = OTHER; note = Phosphorothioate linkage
  modified_base 19^20: mod_base = OTHER; note = Methylphosphonate linkage
  misc_feature 1..29: note = RM115088
aatttggcccttcgtctnatggacaaagt

SEQ ID NO: 444 - DNA, 29 bp, synthetic construct
  source 1..29: mol_type = other DNA
  misc_feature 15..16: note = DNA
  misc_feature order(1..14,17..29): note = RNA
  modified_base 14: mod_base = OTHER; note = 2-Prime-O-Methoxyethyl modified 5-methyl Uridine
  modified_base 15: mod_base = OTHER; note = DNA nucleotide carrying a 6-amino-5-nitro-3-yl-2(1H)-pyridone nucleobase
  modified_base order(7,9,11,18,23): mod_base = OTHER; note = 2-Prime-Fluoro modified nucleoside
  modified_base order(1..6,8,10,12..13,17,19..22,24..29): mod_base = OTHER; note = 2-Prime-O-Methyl modified nucleoside
  modified_base order(1^2,28^29): mod_base = OTHER; note = (1,3-dimethylimidazolidin-2-ylidene) Phosphoramidate linkage
  modified_base order(2..16,17..28): mod_base = OTHER; note = Phosphorothioate linkage
  modified_base 16^17: mod_base = OTHER; note = Methylphosphonate linkage
  misc_feature 1..29: note = RM115089
ttggcccttcgtctnatggacaaagtctt

SEQ ID NO: 445 - DNA, 29 bp, synthetic construct
  source 1..29: mol_type = other DNA
  misc_feature 12..13: note = DNA
  misc_feature order(1..11,14..29): note = RNA
  modified_base 11: mod_base = OTHER; note = 2-Prime-O-Methoxyethyl modified 5-methyl Uridine
  modified_base 12: mod_base = OTHER; note = DNA nucleotide carrying a 6-amino-5-nitro-3-yl-2(1H)-pyridone nucleobase
  modified_base order(4,6,8,15,20): mod_base = OTHER; note = 2-Prime-Fluoro modified nucleoside
  modified_base order(1..3,5,7,9..10,14,16..19,21..29): mod_base = OTHER; note = 2-Prime-O-Methyl modified nucleoside
  modified_base order(1^2,28^29): mod_base = OTHER; note = (1,3-dimethylimidazolidin-2-ylidene) Phosphoramidate linkage
  modified_base order(2..13,14..28): mod_base = OTHER; note = Phosphorothioate linkage
  modified_base 13^14: mod_base = OTHER; note = Methylphosphonate linkage
  misc_feature 1..29: note = RM115090
gcccttcgtctnatggacaaagtctttaa

SEQ ID NO: 446 - DNA, 29 bp, synthetic construct
  source 1..29: mol_type = other DNA
  misc_feature 9..10: note = DNA
  misc_feature order(1..8,11..29): note = RNA
  modified_base 8: mod_base = OTHER; note = 2-Prime-O-Methoxyethyl modified 5-methyl Uridine
  modified_base 9: mod_base = OTHER; note = DNA nucleotide carrying a 6-amino-5-nitro-3-yl-2(1H)-pyridone nucleobase
  modified_base order(1,3,5,12,17): mod_base = OTHER; note = 2-Prime-Fluoro modified nucleoside
  modified_base order(2,4,6..7,11,13..16,18..29): mod_base = OTHER; note = 2-Prime-O-Methyl modified nucleoside
  modified_base order(1^2,28^29): mod_base = OTHER; note = (1,3-dimethylimidazolidin-2-ylidene) Phosphoramidate linkage
  modified_base order(2..10,11..28): mod_base = OTHER; note = Phosphorothioate linkage
  modified_base 10^11: mod_base = OTHER; note = Methylphosphonate linkage
  misc_feature 1..29: note = RM115091
cttcgtctnatggacaaagtctttaagac

SEQ ID NO: 447 - DNA, 23 bp, synthetic construct
  source 1..23: mol_type = other DNA
  misc_feature 18..19: note = DNA
  misc_feature order(1..17,20..23): note = RNA
  modified_base 17: mod_base = OTHER; note = 2-Prime-O-Methoxyethyl modified 5-methyl Uridine
  modified_base 18: mod_base = OTHER; note = DNA nucleotide carrying a 6-amino-5-nitro-3-yl-2(1H)-pyridone nucleobase
  modified_base order(12,21): mod_base = OTHER; note = 2-Prime-Fluoro modified nucleoside
  modified_base order(1..11,13..16,20,22..23): mod_base = OTHER; note = 2-Prime-O-Methyl modified nucleoside
  modified_base order(1^2,22^23): mod_base = OTHER; note = (1,3-dimethylimidazolidin-2-ylidene) Phosphoramidate linkage
  modified_base order(2..19,20..22): mod_base = OTHER; note = Phosphorothioate linkage
  modified_base 19^20: mod_base = OTHER; note = Methylphosphonate linkage
  misc_feature 1..23: note = RM115092
aatttggcccttcgtctnatgga

SEQ ID NO: 448 - DNA, 23 bp, synthetic construct
  source 1..23: mol_type = other DNA
  misc_feature 15..16: note = DNA
  misc_feature order(1..14,17..23): note = RNA
  modified_base 14: mod_base = OTHER; note = 2-Prime-O-Methoxyethyl modified 5-methyl Uridine
  modified_base 15: mod_base = OTHER; note = DNA nucleotide carrying a 6-amino-5-nitro-3-yl-2(1H)-pyridone nucleobase
  modified_base order(9,18): mod_base = OTHER; note = 2-Prime-Fluoro modified nucleoside
  modified_base order(1..8,10..13,17,19..23): mod_base = OTHER; note = 2-Prime-O-Methyl modified nucleoside
  modified_base order(1^2,22^23): mod_base = OTHER; note = (1,3-dimethylimidazolidin-2-ylidene) Phosphoramidate linkage
  modified_base order(2..16,17..22): mod_base = OTHER; note = Phosphorothioate linkage
  modified_base 16^17: mod_base = OTHER; note = Methylphosphonate linkage
  misc_feature 1..23: note = RM115093
ttggcccttcgtctnatggacaa

SEQ ID NO: 449 - DNA, 23 bp, synthetic construct
  source 1..23: mol_type = other DNA
  misc_feature 12..13: note = DNA
  misc_feature order(1..11,14..23): note = RNA
  modified_base 11: mod_base = OTHER; note = 2-Prime-O-Methoxyethyl modified 5-methyl Uridine
  modified_base 12: mod_base = OTHER; note = DNA nucleotide carrying a 6-amino-5-nitro-3-yl-2(1H)-pyridone nucleobase
  modified_base order(6,15): mod_base = OTHER; note = 2-Prime-Fluoro modified nucleoside
  modified_base order(1..5,7..10,14,16..23): mod_base = OTHER; note = 2-Prime-O-Methyl modified nucleoside
  modified_base order(1^2,22^23): mod_base = OTHER; note = (1,3-dimethylimidazolidin-2-ylidene) Phosphoramidate linkage
  modified_base order(2..13,14..22): mod_base = OTHER; note = Phosphorothioate linkage
  modified_base 13^14: mod_base = OTHER; note = Methylphosphonate linkage
  misc_feature 1..23: note = RM115094
gcccttcgtctnatggacaaagt

SEQ ID NO: 450 - DNA, 23 bp, synthetic construct
  source 1..23: mol_type = other DNA
  misc_feature 9..10: note = DNA
  misc_feature order(1..8,11..23): note = RNA
  modified_base 8: mod_base = OTHER; note = 2-Prime-O-Methoxyethyl modified 5-methyl Uridine
  modified_base 9: mod_base = OTHER; note = DNA nucleotide carrying a 6-amino-5-nitro-3-yl-2(1H)-pyridone nucleobase
  modified_base order(3,12): mod_base = OTHER; note = 2-Prime-Fluoro modified nucleoside
  modified_base order(1..2,4..7,11,13..23): mod_base = OTHER; note = 2-Prime-O-Methyl modified nucleoside
  modified_base order(1^2,22^23): mod_base = OTHER; note = (1,3-dimethylimidazolidin-2-ylidene) Phosphoramidate linkage
  modified_base order(2..10,11..22): mod_base = OTHER; note = Phosphorothioate linkage
  modified_base 10^11: mod_base = OTHER; note = Methylphosphonate linkage
  misc_feature 1..23: note = RM115095
cttcgtctnatggacaaagtctt

SEQ ID NO: 451 - DNA, 26 bp, synthetic construct
  source 1..26: mol_type = other DNA
  misc_feature 22..23: note = DNA
  misc_feature order(1..21,24..26): note = RNA
  modified_base 21: mod_base = OTHER; note = 2-Prime-O-Methoxyethyl modified 5-methyl Uridine
  modified_base 22: mod_base = OTHER; note = DNA nucleotide carrying a 6-amino-5-nitro-3-yl-2(1H)-pyridone nucleobase
  modified_base order(16,25): mod_base = OTHER; note = 2-Prime-Fluoro modified nucleoside
  modified_base order(1..15,17..20,24,26): mod_base = OTHER; note = 2-Prime-O-Methyl modified nucleoside
  modified_base order(1^2,25^26): mod_base = OTHER; note = (1,3-dimethylimidazolidin-2-ylidene) Phosphoramidate linkage
  modified_base order(2..23,24^25): mod_base = OTHER; note = Phosphorothioate linkage
  modified_base 23^24: mod_base = OTHER; note = Methylphosphonate linkage
  misc_feature 1..26: note = RM115096
cattaatttggcccttcgtctnatgg

SEQ ID NO: 452 - DNA, 26 bp, synthetic construct
  source 1..26: mol_type = other DNA
  misc_feature 19..20: note = DNA
  misc_feature order(1..18,21..26): note = RNA
  modified_base 18: mod_base = OTHER; note = 2-Prime-O-Methoxyethyl modified 5-methyl Uridine
  modified_base 19: mod_base = OTHER; note = DNA nucleotide carrying a 6-amino-5-nitro-3-yl-2(1H)-pyridone nucleobase
  modified_base order(13,22): mod_base = OTHER; note = 2-Prime-Fluoro modified nucleoside
  modified_base order(1..12,14..17,21,23..26): mod_base = OTHER; note = 2-Prime-O-Methyl modified nucleoside
  modified_base order(1^2,25^26): mod_base = OTHER; note = (1,3-dimethylimidazolidin-2-ylidene) Phosphoramidate linkage
  modified_base order(2..20,21..25): mod_base = OTHER; note = Phosphorothioate linkage
  modified_base 20^21: mod_base = OTHER; note = Methylphosphonate linkage
  misc_feature 1..26: note = RM115097
taatttggcccttcgtctnatggaca

SEQ ID NO: 453 - DNA, 26 bp, synthetic construct
  source 1..26: mol_type = other DNA
  misc_feature 16..17: note = DNA
  misc_feature order(1..15,18..26): note = RNA
  modified_base 15: mod_base = OTHER; note = 2-Prime-O-Methoxyethyl modified 5-methyl Uridine
  modified_base 16: mod_base = OTHER; note = DNA nucleotide carrying a 6-amino-5-nitro-3-yl-2(1H)-pyridone nucleobase
  modified_base order(10,19): mod_base = OTHER; note = 2-Prime-Fluoro modified nucleoside
  modified_base order(1..9,11..14,18,20..26): mod_base = OTHER; note = 2-Prime-O-Methyl modified nucleoside
  modified_base order(1^2,25^26): mod_base = OTHER; note = (1,3-dimethylimidazolidin-2-ylidene) Phosphoramidate linkage
  modified_base order(2..17,18..25): mod_base = OTHER; note = Phosphorothioate linkage
  modified_base 17^18: mod_base = OTHER; note = Methylphosphonate linkage
  misc_feature 1..26: note = RM115098
tttggcccttcgtctnatggacaaag

SEQ ID NO: 454 - DNA, 26 bp, synthetic construct
  source 1..26: mol_type = other DNA
  misc_feature 13..14: note = DNA
  misc_feature order(1..12,15..26): note = RNA
  modified_base 12: mod_base = OTHER; note = 2-Prime-O-Methoxyethyl modified 5-methyl Uridine
  modified_base 13: mod_base = OTHER; note = DNA nucleotide carrying a 6-amino-5-nitro-3-yl-2(1H)-pyridone nucleobase
  modified_base order(7,16): mod_base = OTHER; note = 2-Prime-Fluoro modified nucleoside
  modified_base order(1..6,8..11,15,17..26): mod_base = OTHER; note = 2-Prime-O-Methyl modified nucleoside
  modified_base order(1^2,25^26): mod_base = OTHER; note = (1,3-dimethylimidazolidin-2-ylidene) Phosphoramidate linkage
  modified_base order(2..14,15..25): mod_base = OTHER; note = Phosphorothioate linkage
  modified_base 14^15: mod_base = OTHER; note = Methylphosphonate linkage
  misc_feature 1..26: note = RM115099
ggcccttcgtctnatggacaaagtct

SEQ ID NO: 455 - DNA, 26 bp, synthetic construct
  source 1..26: mol_type = other DNA
  misc_feature 10..11: note = DNA
  misc_feature order(1..9,12..26): note = RNA
  modified_base 9: mod_base = OTHER; note = 2-Prime-O-Methoxyethyl modified 5-methyl Uridine
  modified_base 10: mod_base = OTHER; note = DNA nucleotide carrying a 6-amino-5-nitro-3-yl-2(1H)-pyridone nucleobase
  modified_base order(4,13): mod_base = OTHER; note = 2-Prime-Fluoro modified nucleoside
  modified_base order(1..3,5..8,12,14..26): mod_base = OTHER; note = 2-Prime-O-Methyl modified nucleoside
  modified_base order(1^2,25^26): mod_base = OTHER; note = (1,3-dimethylimidazolidin-2-ylidene) Phosphoramidate linkage
  modified_base order(2..11,12..25): mod_base = OTHER; note = Phosphorothioate linkage
  modified_base 11^12: mod_base = OTHER; note = Methylphosphonate linkage
  misc_feature 1..26: note = RM115100
ccttcgtctnatggacaaagtcttta

SEQ ID NO: 456 - DNA, 26 bp, synthetic construct
  source 1..26: mol_type = other DNA
  misc_feature 7..8: note = DNA
  misc_feature order(1..6,9..26): note = RNA
  modified_base 6: mod_base = OTHER; note = 2-Prime-O-Methoxyethyl modified 5-methyl Uridine
  modified_base 7: mod_base = OTHER; note = DNA nucleotide carrying a 6-amino-5-nitro-3-yl-2(1H)-pyridone nucleobase
  modified_base order(1,10): mod_base = OTHER; note = 2-Prime-Fluoro modified nucleoside
  modified_base order(2..5,9,11..26): mod_base = OTHER; note = 2-Prime-O-Methyl modified nucleoside
  modified_base order(1^2,25^26): mod_base = OTHER; note = (1,3-dimethylimidazolidin-2-ylidene) Phosphoramidate linkage
  modified_base order(2..8,9..25): mod_base = OTHER; note = Phosphorothioate linkage
  modified_base 8^9: mod_base = OTHER; note = Methylphosphonate linkage
  misc_feature 1..26: note = RM115101
tcgtctnatggacaaagtctttaaga

SEQ ID NO: 457 - DNA, 29 bp, synthetic construct
  source 1..29: mol_type = other DNA
  misc_feature 24..25: note = DNA
  misc_feature order(1..23,26..29): note = RNA
  modified_base 23: mod_base = OTHER; note = 2-Prime-O-Methoxyethyl modified 5-methyl Uridine
  modified_base 24: mod_base = OTHER; note = DNA nucleotide carrying a 6-amino-5-nitro-3-yl-2(1H)-pyridone nucleobase
  modified_base order(18,27): mod_base = OTHER; note = 2-Prime-Fluoro modified nucleoside
  modified_base order(1..17,19..22,26,28..29): mod_base = OTHER; note = 2-Prime-O-Methyl modified nucleoside
  modified_base order(1^2,28^29): mod_base = OTHER; note = (1,3-dimethylimidazolidin-2-ylidene) Phosphoramidate linkage
  modified_base order(2..25,26..28): mod_base = OTHER; note = Phosphorothioate linkage
  modified_base 25^26: mod_base = OTHER; note = Methylphosphonate linkage
  misc_feature 1..29: note = RM115102
gtcattaatttggcccttcgtctnatgga

SEQ ID NO: 458 - DNA, 29 bp, synthetic construct
  source 1..29: mol_type = other DNA
  misc_feature 21..22: note = DNA
  misc_feature order(1..20,23..29): note = RNA
  modified_base 20: mod_base = OTHER; note = 2-Prime-O-Methoxyethyl modified 5-methyl Uridine
  modified_base 21: mod_base = OTHER; note = DNA nucleotide carrying a 6-amino-5-nitro-3-yl-2(1H)-pyridone nucleobase
  modified_base order(15,24): mod_base = OTHER; note = 2-Prime-Fluoro modified nucleoside
  modified_base order(1..14,16..19,23,25..29): mod_base = OTHER; note = 2-Prime-O-Methyl modified nucleoside
  modified_base order(1^2,28^29): mod_base = OTHER; note = (1,3-dimethylimidazolidin-2-ylidene) Phosphoramidate linkage
  modified_base order(2..22,23..28): mod_base = OTHER; note = Phosphorothioate linkage
  modified_base 22^23: mod_base = OTHER; note = Methylphosphonate linkage
  misc_feature 1..29: note = RM115103
attaatttggcccttcgtctnatggacaa

SEQ ID NO: 459 - DNA, 29 bp, synthetic construct
  source 1..29: mol_type = other DNA
  misc_feature 18..19: note = DNA
  misc_feature order(1..17,20..29): note = RNA
  modified_base 17: mod_base = OTHER; note = 2-Prime-O-Methoxyethyl modified 5-methyl Uridine
  modified_base 18: mod_base = OTHER; note = DNA nucleotide carrying a 6-amino-5-nitro-3-yl-2(1H)-pyridone nucleobase
  modified_base order(12,21): mod_base = OTHER; note = 2-Prime-Fluoro modified nucleoside
  modified_base order(1..11,13..16,20,22..29): mod_base = OTHER; note = 2-Prime-O-Methyl modified nucleoside
  modified_base order(1^2,28^29): mod_base = OTHER; note = (1,3-dimethylimidazolidin-2-ylidene) Phosphoramidate linkage
  modified_base order(2..19,20..28): mod_base = OTHER; note = Phosphorothioate linkage
  modified_base 19^20: mod_base = OTHER; note = Methylphosphonate linkage
  misc_feature 1..29: note = RM115104
aatttggcccttcgtctnatggacaaagt

SEQ ID NO: 460 - DNA, 29 bp, synthetic construct
  source 1..29: mol_type = other DNA
  misc_feature 15..16: note = DNA
  misc_feature order(1..14,17..29): note = RNA
  modified_base 14: mod_base = OTHER; note = 2-Prime-O-Methoxyethyl modified 5-methyl Uridine
  modified_base 15: mod_base = OTHER; note = DNA nucleotide carrying a 6-amino-5-nitro-3-yl-2(1H)-pyridone nucleobase
  modified_base order(9,18): mod_base = OTHER; note = 2-Prime-Fluoro modified nucleoside
  modified_base order(1..8,10..13,17,19..29): mod_base = OTHER; note = 2-Prime-O-Methyl modified nucleoside
  modified_base order(1^2,28^29): mod_base = OTHER; note = (1,3-dimethylimidazolidin-2-ylidene) Phosphoramidate linkage
  modified_base order(2..16,17..28): mod_base = OTHER; note = Phosphorothioate linkage
  modified_base 16^17: mod_base = OTHER; note = Methylphosphonate linkage
  misc_feature 1..29: note = RM115105
ttggcccttcgtctnatggacaaagtctt

SEQ ID NO: 461 - DNA, 29 bp, synthetic construct
  source 1..29: mol_type = other DNA
  misc_feature 12..13: note = DNA
  misc_feature order(1..11,14..29): note = RNA
  modified_base 11: mod_base = OTHER; note = 2-Prime-O-Methoxyethyl modified 5-methyl Uridine
  modified_base 12: mod_base = OTHER; note = DNA nucleotide carrying a 6-amino-5-nitro-3-yl-2(1H)-pyridone nucleobase
  modified_base order(6,15): mod_base = OTHER; note = 2-Prime-Fluoro modified nucleoside
  modified_base order(1..5,7..10,14,16..29): mod_base = OTHER; note = 2-Prime-O-Methyl modified nucleoside
  modified_base order(1^2,28^29): mod_base = OTHER; note = (1,3-dimethylimidazolidin-2-ylidene) Phosphoramidate linkage
  modified_base order(2..13,14..28): mod_base = OTHER; note = Phosphorothioate linkage
  modified_base 13^14: mod_base = OTHER; note = Methylphosphonate linkage
  misc_feature 1..29: note = RM115106
gcccttcgtctnatggacaaagtctttaa

SEQ ID NO: 462 - DNA, 29 bp, synthetic construct
  source 1..29: mol_type = other DNA
  misc_feature 9..10: note = DNA
  misc_feature order(1..8,11..29): note = RNA
  modified_base 8: mod_base = OTHER; note = 2-Prime-O-Methoxyethyl modified 5-methyl Uridine
  modified_base 9: mod_base = OTHER; note = DNA nucleotide carrying a 6-amino-5-nitro-3-yl-2(1H)-pyridone nucleobase
  modified_base order(3,12): mod_base = OTHER; note = 2-Prime-Fluoro modified nucleoside
  modified_base order(1..2,4..7,11,13..29): mod_base = OTHER; note = 2-Prime-O-Methyl modified nucleoside
  modified_base order(1^2,28^29): mod_base = OTHER; note = (1,3-dimethylimidazolidin-2-ylidene) Phosphoramidate linkage
  modified_base order(2..10,11..28): mod_base = OTHER; note = Phosphorothioate linkage
  modified_base 10^11: mod_base = OTHER; note = Methylphosphonate linkage
  misc_feature 1..29: note = RM115107
cttcgtctnatggacaaagtctttaagac

SEQ ID NO: 463 - DNA, 32 bp, synthetic construct; identical to SEQ ID NO: 80
  source 1..32: mol_type = other DNA
  misc_feature 7..8: note = DNA
  misc_feature order(1..6,9..32): note = RNA
  modified_base 6: mod_base = OTHER; note = 2-Prime-O-Methoxyethyl modified 5-methyl Uridine
  modified_base 7: mod_base = OTHER; note = DNA nucleotide carrying a 6-amino-5-nitro-3-yl-2(1H)-pyridone nucleobase
  modified_base order(5,10..11,18,26,31): mod_base = OTHER; note = 2-Prime-Fluoro modified nucleoside
  modified_base order(1..4,9,12..17,19..25,27..30,32): mod_base = OTHER; note = 2-Prime-O-Methyl modified nucleoside
  modified_base order(1^2,31^32): mod_base = OTHER; note = (1,3-dimethylimidazolidin-2-ylidene) Phosphoramidate linkage
  modified_base order(2..8,9..31): mod_base = OTHER; note = Phosphorothioate linkage
  modified_base 8^9: mod_base = OTHER; note = Methylphosphonate linkage
  misc_feature 1..32: note = RM115108

SEQ ID NO: 464 - DNA, 32 bp, synthetic construct; identical to SEQ ID NO: 73
  source 1..32: mol_type = other DNA
  misc_feature 28..29: note = DNA
  misc_feature order(1..27,30..32): note = RNA
  modified_base 27: mod_base = OTHER; note = 2-Prime-O-Methoxyethyl modified 5-methyl Uridine
  modified_base 28: mod_base = OTHER; note = DNA nucleotide carrying a 6-amino-5-nitro-3-yl-2(1H)-pyridone nucleobase
  modified_base order(6,11,19,26,31..32): mod_base = OTHER; note = 2-Prime-Fluoro modified nucleoside
  modified_base order(1..5,7..10,12..18,20..25,30): mod_base = OTHER; note = 2-Prime-O-Methyl modified nucleoside
  modified_base order(1^2,31^32): mod_base = OTHER; note = (1,3-dimethylimidazolidin-2-ylidene) Phosphoramidate linkage
  modified_base order(2..29,30^31): mod_base = OTHER; note = Phosphorothioate linkage
  modified_base 29^30: mod_base = OTHER; note = Methylphosphonate linkage
  misc_feature 1..32: note = RM115109

SEQ ID NO: 465 - DNA, 32 bp, synthetic construct; identical to SEQ ID NO: 74
  source 1..32: mol_type = other DNA
  misc_feature 25..26: note = DNA
  misc_feature order(1..24,27..32): note = RNA
  modified_base 24: mod_base = OTHER; note = 2-Prime-O-Methoxyethyl modified 5-methyl Uridine
  modified_base 25: mod_base = OTHER; note = DNA nucleotide carrying a 6-amino-5-nitro-3-yl-2(1H)-pyridone nucleobase
  modified_base order(3,8,16,23,28..29): mod_base = OTHER; note = 2-Prime-Fluoro modified nucleoside
  modified_base order(1..2,4..7,9..15,17..22,27,30..32): mod_base = OTHER; note = 2-Prime-O-Methyl modified nucleoside
  modified_base order(1^2,31^32): mod_base = OTHER; note = (1,3-dimethylimidazolidin-2-ylidene) Phosphoramidate linkage
  modified_base order(2..26,27..31): mod_base = OTHER; note = Phosphorothioate linkage
  modified_base 26^27: mod_base = OTHER; note = Methylphosphonate linkage
  misc_feature 1..32: note = RM115110

SEQ ID NO: 466 - DNA, 23 bp, synthetic construct
  source 1..23: mol_type = other DNA
  misc_feature 12..13: note = DNA
  misc_feature order(1..11,14..23): note = RNA
  modified_base 11: mod_base = OTHER; note = 2-Prime-O-Methoxyethyl modified 5-methyl Uridine
  modified_base 12: mod_base = OTHER; note = DNA nucleotide carrying a 6-amino-5-nitro-3-yl-2(1H)-pyridone nucleobase
  modified_base order(10,15..16,23): mod_base = OTHER; note = 2-Prime-Fluoro modified nucleoside
  modified_base order(1..9,14,17..22): mod_base = OTHER; note = 2-Prime-O-Methyl modified nucleoside
  modified_base order(1^2,22^23): mod_base = OTHER; note = (1,3-dimethylimidazolidin-2-ylidene) Phosphoramidate linkage
  modified_base order(2..13,14..22): mod_base = OTHER; note = Phosphorothioate linkage
  modified_base 13^14: mod_base = OTHER; note = Methylphosphonate linkage
  misc_feature 1..23: note = RM115111
gcccttcgtctnatggacaaagt

SEQ ID NO: 467 - DNA, 23 bp, synthetic construct
  source 1..23: mol_type = other DNA
  misc_feature 9..10: note = DNA
  misc_feature order(1..8,11..23): note = RNA
  modified_base 8: mod_base = OTHER; note = 2-Prime-O-Methoxyethyl modified 5-methyl Uridine
  modified_base 9: mod_base = OTHER; note = DNA nucleotide carrying a 6-amino-5-nitro-3-yl-2(1H)-pyridone nucleobase
  modified_base order(7,12..13,20): mod_base = OTHER; note = 2-Prime-Fluoro modified nucleoside
  modified_base order(1..6,11,14..19,21..23): mod_base = OTHER; note = 2-Prime-O-Methyl modified nucleoside
  modified_base order(1^2,22^23): mod_base = OTHER; note = (1,3-dimethylimidazolidin-2-ylidene) Phosphoramidate linkage
  modified_base order(2..10,11..22): mod_base = OTHER; note = Phosphorothioate linkage
  modified_base 10^11: mod_base = OTHER; note = Methylphosphonate linkage
  misc_feature 1..23: note = RM115112
cttcgtctnatggacaaagtctt

SEQ ID NO: 468 - DNA, 23 bp, synthetic construct
  source 1..23: mol_type = other DNA
  misc_feature 6..7: note = DNA
  misc_feature order(1..5,8..23): note = RNA
  modified_base 5: mod_base = OTHER; note = 2-Prime-O-Methoxyethyl modified 5-methyl Uridine
  modified_base 6: mod_base = OTHER; note = DNA nucleotide carrying a 6-amino-5-nitro-3-yl-2(1H)-pyridone nucleobase
  modified_base order(4,9..10,17): mod_base = OTHER; note = 2-Prime-Fluoro modified nucleoside
  modified_base order(1..3,8,11..16,18..23): mod_base = OTHER; note = 2-Prime-O-Methyl modified nucleoside
  modified_base order(1^2,22^23): mod_base = OTHER; note = (1,3-dimethylimidazolidin-2-ylidene) Phosphoramidate linkage
  modified_base order(2..7,8..22): mod_base = OTHER; note = Phosphorothioate linkage
  modified_base 7^8: mod_base = OTHER; note = Methylphosphonate linkage
  misc_feature 1..23: note = RM115113
cgtctnatggacaaagtctttaa

SEQ ID NO: 469 - DNA, 23 bp, synthetic construct
  source 1..23: mol_type = other DNA
  misc_feature 18..19: note = DNA
  misc_feature order(1..17,20..23): note = RNA
  modified_base 17: mod_base = OTHER; note = 2-Prime-O-Methoxyethyl modified 5-methyl Uridine
  modified_base 18: mod_base = OTHER; note = DNA nucleotide carrying a 6-amino-5-nitro-3-yl-2(1H)-pyridone nucleobase
  modified_base order(9,16,21..22): mod_base = OTHER; note = 2-Prime-Fluoro modified nucleoside
  modified_base order(1..8,10..15,20,23): mod_base = OTHER; note = 2-Prime-O-Methyl modified nucleoside
  modified_base order(1^2,22^23): mod_base = OTHER; note = (1,3-dimethylimidazolidin-2-ylidene) Phosphoramidate linkage
  modified_base order(2..19,20..22): mod_base = OTHER; note = Phosphorothioate linkage
  modified_base 19^20: mod_base = OTHER; note = Methylphosphonate linkage
  misc_feature 1..23: note = RM115114
aatttggcccttcgtctnatgga

SEQ ID NO: 470 - DNA, 23 bp, synthetic construct
  source 1..23: mol_type = other DNA
  misc_feature 15..16: note = DNA
  misc_feature order(1..14,17..23): note = RNA
  modified_base 14: mod_base = OTHER; note = 2-Prime-O-Methoxyethyl modified 5-methyl Uridine
  modified_base 15: mod_base = OTHER; note = DNA nucleotide carrying a 6-amino-5-nitro-3-yl-2(1H)-pyridone nucleobase
  modified_base order(6,13,18..19): mod_base = OTHER; note = 2-Prime-Fluoro modified nucleoside
  modified_base order(1..5,7..12,17,20..23): mod_base = OTHER; note = 2-Prime-O-Methyl modified nucleoside
  modified_base order(1^2,22^23): mod_base = OTHER; note = (1,3-dimethylimidazolidin-2-ylidene) Phosphoramidate linkage
  modified_base order(2..16,17..22): mod_base = OTHER; note = Phosphorothioate linkage
  modified_base 16^17: mod_base = OTHER; note = Methylphosphonate linkage
  misc_feature 1..23: note = RM115115
ttggcccttcgtctnatggacaa

SEQ ID NO: 471 - DNA, 23 bp, synthetic construct
  source 1..23: mol_type = other DNA
  misc_feature 12..13: note = DNA
  misc_feature order(1..11,14..23): note = RNA
  modified_base 11: mod_base = OTHER; note = 2-Prime-O-Methoxyethyl modified 5-methyl Uridine
  modified_base 12: mod_base = OTHER; note = DNA nucleotide carrying a 6-amino-5-nitro-3-yl-2(1H)-pyridone nucleobase
  modified_base order(3,10,15..16): mod_base = OTHER; note = 2-Prime-Fluoro modified nucleoside
  modified_base order(1..2,4..9,14,17..23): mod_base = OTHER; note = 2-Prime-O-Methyl modified nucleoside
  modified_base order(1^2,22^23): mod_base = OTHER; note = (1,3-dimethylimidazolidin-2-ylidene) Phosphoramidate linkage
  modified_base order(2..13,14..22): mod_base = OTHER; note = Phosphorothioate linkage
  modified_base 13^14: mod_base = OTHER; note = Methylphosphonate linkage
  misc_feature 1..23: note = RM115116
gcccttcgtctnatggacaaagt

SEQ ID NO: 472 - DNA, 26 bp, synthetic construct
  source 1..26: mol_type = other DNA
  misc_feature 13..14: note = DNA
  misc_feature order(1..12,15..26): note = RNA
  modified_base 12: mod_base = OTHER; note = 2-Prime-O-Methoxyethyl modified 5-methyl Uridine
  modified_base 13: mod_base = OTHER; note = DNA nucleotide carrying a 6-amino-5-nitro-3-yl-2(1H)-pyridone nucleobase
  modified_base order(9..10,16,18,23..24,26): mod_base = OTHER; note = 2-Prime-Fluoro modified nucleoside
  modified_base order(1..8,11,15,17,19..22,25): mod_base = OTHER; note = 2-Prime-O-Methyl modified nucleoside
  modified_base order(1^2,25^26): mod_base = OTHER; note = (1,3-dimethylimidazolidin-2-ylidene) Phosphoramidate linkage
  modified_base order(2..14,15..25): mod_base = OTHER; note = Phosphorothioate linkage
  modified_base 14^15: mod_base = OTHER; note = Methylphosphonate linkage
  misc_feature 1..26: note = RM115117
ggcccttcgtctnatggacaaagtct

SEQ ID NO: 473 - DNA, 26 bp, synthetic construct
  source 1..26: mol_type = other DNA
  misc_feature 10..11: note = DNA
  misc_feature order(1..9,12..26): note = RNA
  modified_base 9: mod_base = OTHER; note = 2-Prime-O-Methoxyethyl modified 5-methyl Uridine
  modified_base 10: mod_base = OTHER; note = DNA nucleotide carrying a 6-amino-5-nitro-3-yl-2(1H)-pyridone nucleobase
  modified_base order(6..7,13,15,20..21,23): mod_base = OTHER; note = 2-Prime-Fluoro modified nucleoside
  modified_base order(1..5,8,12,14,16..19,22,24..26): mod_base = OTHER; note = 2-Prime-O-Methyl modified nucleoside
  modified_base order(1^2,25^26): mod_base = OTHER; note = (1,3-dimethylimidazolidin-2-ylidene) Phosphoramidate linkage
  modified_base order(2..11,12..25): mod_base = OTHER; note = Phosphorothioate linkage
  modified_base 11^12: mod_base = OTHER; note = Methylphosphonate linkage
  misc_feature 1..26: note = RM115118
ccttcgtctnatggacaaagtcttta

SEQ ID NO: 474 - DNA, 26 bp, synthetic construct
  source 1..26: mol_type = other DNA
  misc_feature 7..8: note = DNA
  misc_feature order(1..6,9..26): note = RNA
  modified_base 6: mod_base = OTHER; note = 2-Prime-O-Methoxyethyl modified 5-methyl Uridine
  modified_base 7: mod_base = OTHER; note = DNA nucleotide carrying a 6-amino-5-nitro-3-yl-2(1H)-pyridone nucleobase
  modified_base order(3..4,10,12,17..18,20): mod_base = OTHER; note = 2-Prime-Fluoro modified nucleoside
  modified_base order(1..2,5,9,11,13..16,19,21..26): mod_base = OTHER; note = 2-Prime-O-Methyl modified nucleoside
  modified_base order(1^2,25^26): mod_base = OTHER; note = (1,3-dimethylimidazolidin-2-ylidene) Phosphoramidate linkage
  modified_base order(2..8,9..25): mod_base = OTHER; note = Phosphorothioate linkage
  modified_base 8^9: mod_base = OTHER; note = Methylphosphonate linkage
  misc_feature 1..26: note = RM115119
tcgtctnatggacaaagtctttaaga

SEQ ID NO: 475 - DNA, 26 bp, synthetic construct
  source 1..26: mol_type = other DNA
  misc_feature 19..20: note = DNA
  misc_feature order(1..18,21..26): note = RNA
  modified_base 18: mod_base = OTHER; note = 2-Prime-O-Methoxyethyl modified 5-methyl Uridine
  modified_base 19: mod_base = OTHER; note = DNA nucleotide carrying a 6-amino-5-nitro-3-yl-2(1H)-pyridone nucleobase
  modified_base order(8,10..11,16,22,24..25): mod_base = OTHER; note = 2-Prime-Fluoro modified nucleoside
  modified_base order(1..7,9,12..15,17,21,23,26): mod_base = OTHER; note = 2-Prime-O-Methyl modified nucleoside
  modified_base order(1^2,25^26): mod_base = OTHER; note = (1,3-dimethylimidazolidin-2-ylidene) Phosphoramidate linkage
  modified_base order(2..20,21..25): mod_base = OTHER; note = Phosphorothioate linkage
  modified_base 20^21: mod_base = OTHER; note = Methylphosphonate linkage
  misc_feature 1..26: note = RM115120
taatttggcccttcgtctnatggaca

SEQ ID NO: 476 - DNA, 26 bp, synthetic construct
  source 1..26: mol_type = other DNA
  misc_feature 16..17: note = DNA
  misc_feature order(1..15,18..26): note = RNA
  modified_base 15: mod_base = OTHER; note = 2-Prime-O-Methoxyethyl modified 5-methyl Uridine
  modified_base 16: mod_base = OTHER; note = DNA nucleotide carrying a 6-amino-5-nitro-3-yl-2(1H)-pyridone nucleobase
  modified_base order(5,7..8,13,19,21..22): mod_base = OTHER; note = 2-Prime-Fluoro modified nucleoside
  modified_base order(1..4,6,9..12,14,18,20,23..26): mod_base = OTHER; note = 2-Prime-O-Methyl modified nucleoside
  modified_base order(1^2,25^26): mod_base = OTHER; note = (1,3-dimethylimidazolidin-2-ylidene) Phosphoramidate linkage
  modified_base order(2..17,18..25): mod_base = OTHER; note = Phosphorothioate linkage
  modified_base 17^18: mod_base = OTHER; note = Methylphosphonate linkage
  misc_feature 1..26: note = RM115121
tttggcccttcgtctnatggacaaag

SEQ ID NO: 477 - DNA, 26 bp, synthetic construct
  source 1..26: mol_type = other DNA
  misc_feature 13..14: note = DNA
  misc_feature order(1..12,15..26): note = RNA
  modified_base 12: mod_base = OTHER; note = 2-Prime-O-Methoxyethyl modified 5-methyl Uridine
  modified_base 13: mod_base = OTHER; note = DNA nucleotide carrying a 6-amino-5-nitro-3-yl-2(1H)-pyridone nucleobase
  modified_base order(2,4..5,10,16,18..19): mod_base = OTHER; note = 2-Prime-Fluoro modified nucleoside
  modified_base order(1,3,6..9,11,15,17,20..26): mod_base = OTHER; note = 2-Prime-O-Methyl modified nucleoside
  modified_base order(1^2,25^26): mod_base = OTHER; note = (1,3-dimethylimidazolidin-2-ylidene) Phosphoramidate linkage
  modified_base order(2..14,15..25): mod_base = OTHER; note = Phosphorothioate linkage
  modified_base 14^15: mod_base = OTHER; note = Methylphosphonate linkage
  misc_feature 1..26: note = RM115122
ggcccttcgtctnatggacaaagtct

SEQ ID NO: 478 - DNA, 26 bp, synthetic construct
  source 1..26: mol_type = other DNA
  misc_feature 16..17: note = DNA
  misc_feature order(1..15,18..26): note = RNA
  modified_base 15: mod_base = OTHER; note = 2-Prime-O-Methoxyethyl modified 5-methyl Uridine
  modified_base 16: mod_base = OTHER; note = DNA nucleotide carrying a 6-amino-5-nitro-3-yl-2(1H)-pyridone nucleobase
  modified_base order(12..13,19,21,26): mod_base = OTHER; note = 2-Prime-Fluoro modified nucleoside
  modified_base order(1..11,14,18,20,22..25): mod_base = OTHER; note = 2-Prime-O-Methyl modified nucleoside
  modified_base order(1^2,25^26): mod_base = OTHER; note = (1,3-dimethylimidazolidin-2-ylidene) Phosphoramidate linkage
  modified_base order(2..17,18..25): mod_base = OTHER; note = Phosphorothioate linkage
  modified_base 17^18: mod_base = OTHER; note = Methylphosphonate linkage
  misc_feature 1..26: note = RM115123
tttggcccttcgtctnatggacaaag

SEQ ID NO: 479 - DNA, 26 bp, synthetic construct
  source 1..26: mol_type = other DNA
  misc_feature 13..14: note = DNA
  misc_feature order(1..12,15..26): note = RNA
  modified_base 12: mod_base = OTHER; note = 2-Prime-O-Methoxyethyl modified 5-methyl Uridine
  modified_base 13: mod_base = OTHER; note = DNA nucleotide carrying a 6-amino-5-nitro-3-yl-2(1H)-pyridone nucleobase
  modified_base order(9..10,16,18,23): mod_base = OTHER; note = 2-Prime-Fluoro modified nucleoside
  modified_base order(1..8,11,15,17,19..22,24..26): mod_base = OTHER; note = 2-Prime-O-Methyl modified nucleoside
  modified_base order(1^2,25^26): mod_base = OTHER; note = (1,3-dimethylimidazolidin-2-ylidene) Phosphoramidate linkage
  modified_base order(2..14,15..25): mod_base = OTHER; note = Phosphorothioate linkage
  modified_base 14^15: mod_base = OTHER; note = Methylphosphonate linkage
  misc_feature 1..26: note = RM115124
ggcccttcgtctnatggacaaagtct

SEQ ID NO: 480 - DNA, 26 bp, synthetic construct
  source 1..26: mol_type = other DNA
  misc_feature 10..11: note = DNA
  misc_feature order(1..9,12..26): note = RNA
  modified_base 9: mod_base = OTHER; note = 2-Prime-O-Methoxyethyl modified 5-methyl Uridine
  modified_base 10: mod_base = OTHER; note = DNA nucleotide carrying a 6-amino-5-nitro-3-yl-2(1H)-pyridone nucleobase
  modified_base order(6..7,13,15,20): mod_base = OTHER; note = 2-Prime-Fluoro modified nucleoside
  modified_base order(1..5,8,12,14,16..19,21..26): mod_base = OTHER; note = 2-Prime-O-Methyl modified nucleoside
  modified_base order(1^2,25^26): mod_base = OTHER; note = (1,3-dimethylimidazolidin-2-ylidene) Phosphoramidate linkage
  modified_base order(2..11,12..25): mod_base = OTHER; note = Phosphorothioate linkage
  modified_base 11^12: mod_base = OTHER; note = Methylphosphonate linkage
  misc_feature 1..26: note = RM115125
ccttcgtctnatggacaaagtcttta

SEQ ID NO: 481 - DNA, 26 bp, synthetic construct
  source 1..26: mol_type = other DNA
  misc_feature 7..8: note = DNA
  misc_feature order(1..6,9..26): note = RNA
  modified_base 6: mod_base = OTHER; note = 2-Prime-O-Methoxyethyl modified 5-methyl Uridine
  modified_base 7: mod_base = OTHER; note = DNA nucleotide carrying a 6-amino-5-nitro-3-yl-2(1H)-pyridone nucleobase
  modified_base order(3..4,10,12,17): mod_base = OTHER; note = 2-Prime-Fluoro modified nucleoside
  modified_base order(1..2,5,9,11,13..16,18..26): mod_base = OTHER; note = 2-Prime-O-Methyl modified nucleoside
  modified_base order(1^2,25^26): mod_base = OTHER; note = (1,3-dimethylimidazolidin-2-ylidene) Phosphoramidate linkage
  modified_base order(2..8,9..25): mod_base = OTHER; note = Phosphorothioate linkage
  modified_base 8^9: mod_base = OTHER; note = Methylphosphonate linkage
  misc_feature 1..26: note = RM115126
tcgtctnatggacaaagtctttaaga

SEQ ID NO: 482 - DNA, 29 bp, synthetic construct
  source 1..29: mol_type = other DNA
  misc_feature 18..19: note = DNA
  misc_feature order(1..17,20..29): note = RNA
  modified_base 17: mod_base = OTHER; note = 2-Prime-O-Methoxyethyl modified 5-methyl Uridine
  modified_base 18: mod_base = OTHER; note = DNA nucleotide carrying a 6-amino-5-nitro-3-yl-2(1H)-pyridone nucleobase
  modified_base order(14..15,21,23,28): mod_base = OTHER; note = 2-Prime-Fluoro modified nucleoside
  modified_base order(1..13,16,20,22,24..27,29): mod_base = OTHER; note = 2-Prime-O-Methyl modified nucleoside
  modified_base order(1^2,28^29): mod_base = OTHER; note = (1,3-dimethylimidazolidin-2-ylidene) Phosphoramidate linkage
  modified_base order(2..19,20..28): mod_base = OTHER; note = Phosphorothioate linkage
  modified_base 19^20: mod_base = OTHER; note = Methylphosphonate linkage
  misc_feature 1..29: note = RM115127
aatttggcccttcgtctnatggacaaagt

SEQ ID NO: 483 - DNA, 29 bp, synthetic construct
  source 1..29: mol_type = other DNA
  misc_feature 15..16: note = DNA
  misc_feature order(1..14,17..29): note = RNA
  modified_base 14: mod_base = OTHER; note = 2-Prime-O-Methoxyethyl modified 5-methyl Uridine
  modified_base 15: mod_base = OTHER; note = DNA nucleotide carrying a 6-amino-5-nitro-3-yl-2(1H)-pyridone nucleobase
  modified_base order(11..12,18,20,25): mod_base = OTHER; note = 2-Prime-Fluoro modified nucleoside
  modified_base order(1..10,13,17,19,21..24,26..29): mod_base = OTHER; note = 2-Prime-O-Methyl modified nucleoside
  modified_base order(1^2,28^29): mod_base = OTHER; note = (1,3-dimethylimidazolidin-2-ylidene) Phosphoramidate linkage
  modified_base order(2..16,17..28): mod_base = OTHER; note = Phosphorothioate linkage
  modified_base 16^17: mod_base = OTHER; note = Methylphosphonate linkage
  misc_feature 1..29: note = RM115128
ttggcccttcgtctnatggacaaagtctt

SEQ ID NO: 484 - DNA, 29 bp, synthetic construct
  source 1..29: mol_type = other DNA
  misc_feature 12..13: note = DNA
  misc_feature order(1..11,14..29): note = RNA
  modified_base 11: mod_base = OTHER; note = 2-Prime-O-Methoxyethyl modified 5-methyl Uridine
  modified_base 12: mod_base = OTHER; note = DNA nucleotide carrying a 6-amino-5-nitro-3-yl-2(1H)-pyridone nucleobase
  modified_base order(8..9,15,17,22): mod_base = OTHER; note = 2-Prime-Fluoro modified nucleoside
  modified_base order(1..7,10,14,16,18..21,23..29): mod_base = OTHER; note = 2-Prime-O-Methyl modified nucleoside
  modified_base order(1^2,28^29): mod_base = OTHER; note = (1,3-dimethylimidazolidin-2-ylidene) Phosphoramidate linkage
  modified_base order(2..13,14..28): mod_base = OTHER; note = Phosphorothioate linkage
  modified_base 13^14: mod_base = OTHER; note = Methylphosphonate linkage
  misc_feature 1..29: note = RM115129
gcccttcgtctnatggacaaagtctttaa

SEQ ID NO: 485 - DNA, 29 bp, synthetic construct
  source 1..29: mol_type = other DNA
  misc_feature 9..10: note = DNA
  misc_feature order(1..8,11..29): note = RNA
  modified_base 8: mod_base = OTHER; note = 2-Prime-O-Methoxyethyl modified 5-methyl Uridine
  modified_base 9: mod_base = OTHER; note = DNA nucleotide carrying a 6-amino-5-nitro-3-yl-2(1H)-pyridone nucleobase
  modified_base order(5..6,12,14,19): mod_base = OTHER; note = 2-Prime-Fluoro modified nucleoside
  modified_base order(1..4,7,11,13,15..18,20..29): mod_base = OTHER; note = 2-Prime-O-Methyl modified nucleoside
  modified_base order(1^2,28^29): mod_base = OTHER; note = (1,3-dimethylimidazolidin-2-ylidene) Phosphoramidate linkage
  modified_base order(2..10,11..28): mod_base = OTHER; note = Phosphorothioate linkage
  modified_base 10^11: mod_base = OTHER; note = Methylphosphonate linkage
  misc_feature 1..29: note = RM115130
cttcgtctnatggacaaagtctttaagac

SEQ ID NO: 486 - DNA, 29 bp, synthetic construct
  source 1..29: mol_type = other DNA
  misc_feature 6..7: note = DNA
  misc_feature order(1..5,8..29): note = RNA
  modified_base 5: mod_base = OTHER; note = 2-Prime-O-Methoxyethyl modified 5-methyl Uridine
  modified_base 6: mod_base = OTHER; note = DNA nucleotide carrying a 6-amino-5-nitro-3-yl-2(1H)-pyridone nucleobase
  modified_base order(2..3,9,11,16): mod_base = OTHER; note = 2-Prime-Fluoro modified nucleoside
  modified_base order(1,4,8,10,12..15,17..29): mod_base = OTHER; note = 2-Prime-O-Methyl modified nucleoside
  modified_base order(1^2,28^29): mod_base = OTHER; note = (1,3-dimethylimidazolidin-2-ylidene) Phosphoramidate linkage
  modified_base order(2..7,8..28): mod_base = OTHER; note = Phosphorothioate linkage
  modified_base 7^8: mod_base = OTHER; note = Methylphosphonate linkage
  misc_feature 1..29: note = RM115131
cgtctnatggacaaagtctttaagaccat

SEQ ID NO: 487 - DNA, 26 bp, synthetic construct
  source 1..26: mol_type = other DNA
  misc_feature 19..20: note = DNA
  misc_feature order(1..18,21..26): note = RNA
  modified_base 18: mod_base = OTHER; note = 2-Prime-O-Methoxyethyl modified 5-methyl Uridine
  modified_base 19: mod_base = OTHER; note = DNA nucleotide carrying a 6-amino-5-nitro-3-yl-2(1H)-pyridone nucleobase
  modified_base order(11,16,22,24..25): mod_base = OTHER; note = 2-Prime-Fluoro modified nucleoside
  modified_base order(1..10,12..15,17,21,23,26): mod_base = OTHER; note = 2-Prime-O-Methyl modified nucleoside
  modified_base order(1^2,25^26): mod_base = OTHER; note = (1,3-dimethylimidazolidin-2-ylidene) Phosphoramidate linkage
  modified_base order(2..20,21..25): mod_base = OTHER; note = Phosphorothioate linkage
  modified_base 20^21: mod_base = OTHER; note = Methylphosphonate linkage
  misc_feature 1..26: note = RM115132
taatttggcccttcgtctnatggaca

SEQ ID NO: 488 - DNA, 26 bp, synthetic construct
  source 1..26: mol_type = other DNA
  misc_feature 16..17: note = DNA
  misc_feature order(1..15,18..26): note = RNA
  modified_base 15: mod_base = OTHER; note = 2-Prime-O-Methoxyethyl modified 5-methyl Uridine
  modified_base 16: mod_base = OTHER; note = DNA nucleotide carrying a 6-amino-5-nitro-3-yl-2(1H)-pyridone nucleobase
  modified_base order(8,13,19,21..22): mod_base = OTHER; note = 2-Prime-Fluoro modified nucleoside
  modified_base order(1..7,9..12,14,18,20,23..26): mod_base = OTHER; note = 2-Prime-O-Methyl modified nucleoside
  modified_base order(1^2,25^26): mod_base = OTHER; note = (1,3-dimethylimidazolidin-2-ylidene) Phosphoramidate linkage
  modified_base order(2..17,18..25): mod_base = OTHER; note = Phosphorothioate linkage
  modified_base 17^18: mod_base = OTHER; note = Methylphosphonate linkage
  misc_feature 1..26: note = RM115133
tttggcccttcgtctnatggacaaag

SEQ ID NO: 489 - DNA, 26 bp, synthetic construct
  source 1..26: mol_type = other DNA
  misc_feature 13..14: note = DNA
  misc_feature order(1..12,15..26): note = RNA
  modified_base 12: mod_base = OTHER; note = 2-Prime-O-Methoxyethyl modified 5-methyl Uridine
  modified_base 13: mod_base = OTHER; note = DNA nucleotide carrying a 6-amino-5-nitro-3-yl-2(1H)-pyridone nucleobase
  modified_base order(5,10,16,18..19): mod_base = OTHER; note = 2-Prime-Fluoro modified nucleoside
  modified_base order(1..4,6..9,11,15,17,20..26): mod_base = OTHER; note = 2-Prime-O-Methyl modified nucleoside
  modified_base order(1^2,25^26): mod_base = OTHER; note = (1,3-dimethylimidazolidin-2-ylidene) Phosphoramidate linkage
  modified_base order(2..14,15..25): mod_base = OTHER; note = Phosphorothioate linkage
  modified_base 14^15: mod_base = OTHER; note = Methylphosphonate linkage
  misc_feature 1..26: note = RM115134
ggcccttcgtctnatggacaaagtct

SEQ ID NO: 490 - DNA, 26 bp, synthetic construct
  source 1..26: mol_type = other DNA
  misc_feature 10..11: note = DNA
  misc_feature order(1..9,12..26): note = RNA
  modified_base 9: mod_base = OTHER; note = 2-Prime-O-Methoxyethyl modified 5-methyl Uridine
  modified_base 10: mod_base = OTHER; note = DNA nucleotide carrying a 6-amino-5-nitro-3-yl-2(1H)-pyridone nucleobase
  modified_base order(2,7,13,15..16): mod_base = OTHER; note = 2-Prime-Fluoro modified nucleoside
  modified_base order(1,3..6,8,12,14,17..26): mod_base = OTHER; note = 2-Prime-O-Methyl modified nucleoside
  modified_base order(1^2,25^26): mod_base = OTHER; note = (1,3-dimethylimidazolidin-2-ylidene) Phosphoramidate linkage
  modified_base order(2..11,12..25): mod_base = OTHER; note = Phosphorothioate linkage
  modified_base 11^12: mod_base = OTHER; note = Methylphosphonate linkage
  misc_feature 1..26: note = RM115135
ccttcgtctnatggacaaagtcttta

SEQ ID NO: 491 - DNA, 29 bp, synthetic construct
  source 1..29: mol_type = other DNA
  misc_feature 21..22: note = DNA
  misc_feature order(1..20,23..29): note = RNA
  modified_base 20: mod_base = OTHER; note = 2-Prime-O-Methoxyethyl modified 5-methyl Uridine
  modified_base 21: mod_base = OTHER; note = DNA nucleotide carrying a 6-amino-5-nitro-3-yl-2(1H)-pyridone nucleobase
  modified_base order(13,18,24,26..27): mod_base = OTHER; note = 2-Prime-Fluoro modified nucleoside
  modified_base order(1..12,14..17,19,23,25,28..29): mod_base = OTHER; note = 2-Prime-O-Methyl modified nucleoside
  modified_base order(1^2,28^29): mod_base = OTHER; note = (1,3-dimethylimidazolidin-2-ylidene) Phosphoramidate linkage
  modified_base order(2..22,23..28): mod_base = OTHER; note = Phosphorothioate linkage
  modified_base 22^23: mod_base = OTHER; note = Methylphosphonate linkage
  misc_feature 1..29: note = RM115136
attaatttggcccttcgtctnatggacaa

SEQ ID NO: 492 - DNA, 29 bp, synthetic construct
  source 1..29: mol_type = other DNA
  misc_feature 18..19: note = DNA
  misc_feature order(1..17,20..29): note = RNA
  modified_base 17: mod_base = OTHER; note = 2-Prime-O-Methoxyethyl modified 5-methyl Uridine
  modified_base 18: mod_base = OTHER; note = DNA nucleotide carrying a 6-amino-5-nitro-3-yl-2(1H)-pyridone nucleobase
  modified_base order(10,15,21,23..24): mod_base = OTHER; note = 2-Prime-Fluoro modified nucleoside
  modified_base order(1..9,11..14,16,20,22,25..29): mod_base = OTHER; note = 2-Prime-O-Methyl modified nucleoside
  modified_base order(1^2,28^29): mod_base = OTHER; note = (1,3-dimethylimidazolidin-2-ylidene) Phosphoramidate linkage
  modified_base order(2..19,20..28): mod_base = OTHER; note = Phosphorothioate linkage
  modified_base 19^20: mod_base = OTHER; note = Methylphosphonate linkage
  misc_feature 1..29: note = RM115137
aatttggcccttcgtctnatggacaaagt

SEQ ID NO: 493 - DNA, 29 bp, synthetic construct
  source 1..29: mol_type = other DNA
  misc_feature 15..16: note = DNA
  misc_feature order(1..14,17..29): note = RNA
  modified_base 14: mod_base = OTHER; note = 2-Prime-O-Methoxyethyl modified 5-methyl Uridine
  modified_base 15: mod_base = OTHER; note = DNA nucleotide carrying a 6-amino-5-nitro-3-yl-2(1H)-pyridone nucleobase
  modified_base order(7,12,18,20..21): mod_base = OTHER; note = 2-Prime-Fluoro modified nucleoside
  modified_base order(1..6,8..11,13,17,19,22..29): mod_base = OTHER; note = 2-Prime-O-Methyl modified nucleoside
  modified_base order(1^2,28^29): mod_base = OTHER; note = (1,3-dimethylimidazolidin-2-ylidene) Phosphoramidate linkage
  modified_base order(2..16,17..28): mod_base = OTHER; note = Phosphorothioate linkage
  modified_base 16^17: mod_base = OTHER; note = Methylphosphonate linkage
  misc_feature 1..29: note = RM115138
ttggcccttcgtctnatggacaaagtctt

SEQ ID NO: 494 - DNA, 29 bp, synthetic construct
  source 1..29: mol_type = other DNA
  misc_feature 12..13: note = DNA
  misc_feature order(1..11,14..29): note = RNA
  modified_base 11: mod_base = OTHER; note = 2-Prime-O-Methoxyethyl modified 5-methyl Uridine
  modified_base 12: mod_base = OTHER; note = DNA nucleotide carrying a 6-amino-5-nitro-3-yl-2(1H)-pyridone nucleobase
  modified_base order(4,9,15,17..18): mod_base = OTHER; note = 2-Prime-Fluoro modified nucleoside
  modified_base order(1..3,5..8,10,14,16,19..29): mod_base = OTHER; note = 2-Prime-O-Methyl modified nucleoside
  modified_base order(1^2,28^29): mod_base = OTHER; note = (1,3-dimethylimidazolidin-2-ylidene) Phosphoramidate linkage
  modified_base order(2..13,14..28): mod_base = OTHER; note = Phosphorothioate linkage
  modified_base 13^14: mod_base = OTHER; note = Methylphosphonate linkage
  misc_feature 1..29: note = RM115139
gcccttcgtctnatggacaaagtctttaa

SEQ ID NO: 495 - DNA, 29 bp, synthetic construct
  source 1..29: mol_type = other DNA
  misc_feature 9..10: note = DNA
  misc_feature order(1..8,11..29): note = RNA
  modified_base 8: mod_base = OTHER; note = 2-Prime-O-Methoxyethyl modified 5-methyl Uridine
  modified_base 9: mod_base = OTHER; note = DNA nucleotide carrying a 6-amino-5-nitro-3-yl-2(1H)-pyridone nucleobase
  modified_base order(1,6,12,14..15): mod_base = OTHER; note = 2-Prime-Fluoro modified nucleoside
  modified_base order(2..5,7,11,13,16..29): mod_base = OTHER; note = 2-Prime-O-Methyl modified nucleoside
  modified_base order(1^2,28^29): mod_base = OTHER; note = (1,3-dimethylimidazolidin-2-ylidene) Phosphoramidate linkage
  modified_base order(2..10,11..28): mod_base = OTHER; note = Phosphorothioate linkage
  modified_base 10^11: mod_base = OTHER; note = Methylphosphonate linkage
  misc_feature 1..29: note = RM115140
cttcgtctnatggacaaagtctttaagac

SEQ ID NO: 496 - DNA, 32 bp, synthetic construct; identical to SEQ ID NO: 75
  source 1..32: mol_type = other DNA
  misc_feature 22..23: note = DNA
  misc_feature order(1..21,24..32): note = RNA
  modified_base 21: mod_base = OTHER; note = 2-Prime-O-Methoxyethyl modified 5-methyl Uridine
  modified_base 22: mod_base = OTHER; note = DNA nucleotide carrying a 6-amino-5-nitro-3-yl-2(1H)-pyridone nucleobase
  modified_base order(8,13,16,18..19,25..26,31..32): mod_base = OTHER; note = 2-Prime-Fluoro modified nucleoside
  modified_base order(1..7,9..12,14..15,17,20,24,27..30): mod_base = OTHER; note = 2-Prime-O-Methyl modified nucleoside
  modified_base order(1^2,31^32): mod_base = OTHER; note = (1,3-dimethylimidazolidin-2-ylidene) Phosphoramidate linkage
  modified_base order(2..23,24..31): mod_base = OTHER; note = Phosphorothioate linkage
  modified_base 23^24: mod_base = OTHER; note = Methylphosphonate linkage
  misc_feature 1..32: note = RM115141

SEQ ID NO: 497 - DNA, 32 bp, synthetic construct; identical to SEQ ID NO: 76
  source 1..32: mol_type = other DNA
  misc_feature 19..20: note = DNA
  misc_feature order(1..18,21..32): note = RNA
  modified_base 18: mod_base = OTHER; note = 2-Prime-O-Methoxyethyl modified 5-methyl Uridine
  modified_base 19: mod_base = OTHER; note = DNA nucleotide carrying a 6-amino-5-nitro-3-yl-2(1H)-pyridone nucleobase
  modified_base order(5,10,13,15..16,22..23,28..29): mod_base = OTHER; note = 2-Prime-Fluoro modified nucleoside
  modified_base order(1..4,6..9,11..12,14,17,21,24..27,30..32): mod_base = OTHER; note = 2-Prime-O-Methyl modified nucleoside
  modified_base order(1^2,31^32): mod_base = OTHER; note = (1,3-dimethylimidazolidin-2-ylidene) Phosphoramidate linkage
  modified_base order(2..20,21..31): mod_base = OTHER; note = Phosphorothioate linkage
  modified_base 20^21: mod_base = OTHER; note = Methylphosphonate linkage
  misc_feature 1..32: note = RM115142

SEQ ID NO: 498 - DNA, 32 bp, synthetic construct; identical to SEQ ID NO: 77
  source 1..32: mol_type = other DNA
  misc_feature 16..17: note = DNA
  misc_feature order(1..15,18..32): note = RNA
  modified_base 15: mod_base = OTHER; note = 2-Prime-O-Methoxyethyl modified 5-methyl Uridine
  modified_base 16: mod_base = OTHER; note = DNA nucleotide carrying a 6-amino-5-nitro-3-yl-2(1H)-pyridone nucleobase
  modified_base order(2,7,10,12..13,19..20,25..26): mod_base = OTHER; note = 2-Prime-Fluoro modified nucleoside
  modified_base order(1,3..6,8..9,11,14,18,21..24,27..32): mod_base = OTHER; note = 2-Prime-O-Methyl modified nucleoside
  modified_base order(1^2,31^32): mod_base = OTHER; note = (1,3-dimethylimidazolidin-2-ylidene) Phosphoramidate linkage
  modified_base order(2..17,18..31): mod_base = OTHER; note = Phosphorothioate linkage
  modified_base 17^18: mod_base = OTHER; note = Methylphosphonate linkage
  misc_feature 1..32: note = RM115143

SEQ ID NO: 499 - DNA, 32 bp, synthetic construct; identical to SEQ ID NO: 77
  source 1..32: mol_type = other DNA
  misc_feature 16..17: note = DNA
  misc_feature order(1..15,18..32): note = RNA
  modified_base 15: mod_base = OTHER; note = 2-Prime-O-Methoxyethyl modified 5-methyl Uridine
  modified_base 16: mod_base = OTHER; note = DNA nucleotide carrying a 6-amino-5-nitro-3-yl-2(1H)-pyridone nucleobase
  modified_base order(8..9,14,19,21..22,24,27,32): mod_base = OTHER; note = 2-Prime-Fluoro modified nucleoside
  modified_base order(1..7,10..13,18,20,23,25..26,28..31): mod_base = OTHER; note = 2-Prime-O-Methyl modified nucleoside
  modified_base order(1^2,31^32): mod_base = OTHER; note = (1,3-dimethylimidazolidin-2-ylidene) Phosphoramidate linkage
  modified_base order(2..17,18..31): mod_base = OTHER; note = Phosphorothioate linkage
  modified_base 17^18: mod_base = OTHER; note = Methylphosphonate linkage
  misc_feature 1..32: note = RM115144

SEQ ID NO: 500 - DNA, 32 bp, synthetic construct; identical to SEQ ID NO: 78
  source 1..32: mol_type = other DNA
  misc_feature 13..14: note = DNA
  misc_feature order(1..12,15..32): note = RNA
  modified_base 12: mod_base = OTHER; note = 2-Prime-O-Methoxyethyl modified 5-methyl Uridine
  modified_base 13: mod_base = OTHER; note = DNA nucleotide carrying a 6-amino-5-nitro-3-yl-2(1H)-pyridone nucleobase
  modified_base order(5..6,11,16,18..19,21,24,29): mod_base = OTHER; note = 2-Prime-Fluoro modified nucleoside
  modified_base order(1..4,7..10,15,17,20,22..23,25..28,30..32): mod_base = OTHER; note = 2-Prime-O-Methyl modified nucleoside
  modified_base order(1^2,31^32): mod_base = OTHER; note = (1,3-dimethylimidazolidin-2-ylidene) Phosphoramidate linkage
  modified_base order(2..14,15..31): mod_base = OTHER; note = Phosphorothioate linkage
  modified_base 14^15: mod_base = OTHER; note = Methylphosphonate linkage
  misc_feature 1..32: note = RM115145

SEQ ID NO: 501 - DNA, 32 bp, synthetic construct; identical to SEQ ID NO: 79
  source 1..32: mol_type = other DNA
  misc_feature 10..11: note = DNA
  misc_feature order(1..9,12..32): note = RNA
  modified_base 9: mod_base = OTHER; note = 2-Prime-O-Methoxyethyl modified 5-methyl Uridine
  modified_base 10: mod_base = OTHER; note = DNA nucleotide carrying a 6-amino-5-nitro-3-yl-2(1H)-pyridone nucleobase
  modified_base order(2..3,8,13,15..16,18,21,26): mod_base = OTHER; note = 2-Prime-Fluoro modified nucleoside
  modified_base order(1,4..7,12,14,17,19..20,22..25,27..32): mod_base = OTHER; note = 2-Prime-O-Methyl modified nucleoside
  modified_base order(1^2,31^32): mod_base = OTHER; note = (1,3-dimethylimidazolidin-2-ylidene) Phosphoramidate linkage
  modified_base order(2..11,12..31): mod_base = OTHER; note = Phosphorothioate linkage
  modified_base 11^12: mod_base = OTHER; note = Methylphosphonate linkage
  misc_feature 1..32: note = RM115146

SEQ ID NO: 502 - DNA, 23 bp, synthetic construct
  source 1..23: mol_type = other DNA
  misc_feature 18..19: note = DNA
  misc_feature order(1..17,20..23): note = RNA
  modified_base 17: mod_base = OTHER; note = 2-Prime-O-Methoxyethyl modified 5-methyl Uridine
  modified_base 18: mod_base = OTHER; note = DNA nucleotide carrying a 6-amino-5-nitro-3-yl-2(1H)-pyridone nucleobase
  modified_base order(9,12,14..15,21..22): mod_base = OTHER; note = 2-Prime-Fluoro modified nucleoside
  modified_base order(1..8,10..11,13,16,20,23): mod_base = OTHER; note = 2-Prime-O-Methyl modified nucleoside
  modified_base order(1^2,22^23): mod_base = OTHER; note = (1,3-dimethylimidazolidin-2-ylidene) Phosphoramidate linkage
  modified_base order(2..19,20..22): mod_base = OTHER; note = Phosphorothioate linkage
  modified_base 19^20: mod_base = OTHER; note = Methylphosphonate linkage
  misc_feature 1..23: note = RM115147
aatttggcccttcgtctnatgga

SEQ ID NO: 503 - DNA, 23 bp, synthetic construct
  source 1..23: mol_type = other DNA
  misc_feature 15..16: note = DNA
  misc_feature order(1..14,17..23): note = RNA
  modified_base 14: mod_base = OTHER; note = 2-Prime-O-Methoxyethyl modified 5-methyl Uridine
  modified_base 15: mod_base = OTHER; note = DNA nucleotide carrying a 6-amino-5-nitro-3-yl-2(1H)-pyridone nucleobase
  modified_base order(6,9,11..12,18..19): mod_base = OTHER; note = 2-Prime-Fluoro modified nucleoside
  modified_base order(1..5,7..8,10,13,17,20..23): mod_base = OTHER; note = 2-Prime-O-Methyl modified nucleoside
  modified_base order(1^2,22^23): mod_base = OTHER; note = (1,3-dimethylimidazolidin-2-ylidene) Phosphoramidate linkage
  modified_base order(2..16,17..22): mod_base = OTHER; note = Phosphorothioate linkage
  modified_base 16^17: mod_base = OTHER; note = Methylphosphonate linkage
  misc_feature 1..23: note = RM115148
ttggcccttcgtctnatggacaa

SEQ ID NO: 504 - DNA, 23 bp, synthetic construct
  source 1..23: mol_type = other DNA
  misc_feature 12..13: note = DNA
  misc_feature order(1..11,14..23): note = RNA
  modified_base 11: mod_base = OTHER; note = 2-Prime-O-Methoxyethyl modified 5-methyl Uridine
  modified_base 12: mod_base = OTHER; note = DNA nucleotide carrying a 6-amino-5-nitro-3-yl-2(1H)-pyridone nucleobase
  modified_base order(3,6,8..9,15..16): mod_base = OTHER; note = 2-Prime-Fluoro modified nucleoside
  modified_base order(1..2,4..5,7,10,14,17..23): mod_base = OTHER; note = 2-Prime-O-Methyl modified nucleoside
  modified_base order(1^2,22^23): mod_base = OTHER; note = (1,3-dimethylimidazolidin-2-ylidene) Phosphoramidate linkage
  modified_base order(2..13,14..22): mod_base = OTHER; note = Phosphorothioate linkage
  modified_base 13^14: mod_base = OTHER; note = Methylphosphonate linkage
  misc_feature 1..23: note = RM115149
gcccttcgtctnatggacaaagt

SEQ ID NO: 505 - DNA, 32 bp, synthetic construct; identical to SEQ ID NO: 73
  source 1..32: mol_type = other DNA
  misc_feature 28..29: note = DNA
  misc_feature order(1..27,30..32): note = RNA
  modified_base 27: mod_base = OTHER; note = 2-Prime-O-Methoxyethyl modified 5-methyl Uridine
  modified_base 28: mod_base = OTHER; note = DNA nucleotide carrying a 6-amino-5-nitro-3-yl-2(1H)-pyridone nucleobase
  modified_base order(19,22,24..25,31..32): mod_base = OTHER; note = 2-Prime-Fluoro modified nucleoside
  modified_base order(1..18,20..21,23,26,30): mod_base = OTHER; note = 2-Prime-O-Methyl modified nucleoside
  modified_base order(1^2,31^32): mod_base = OTHER; note = (1,3-dimethylimidazolidin-2-ylidene) Phosphoramidate linkage
  modified_base order(2..29,30^31): mod_base = OTHER; note = Phosphorothioate linkage
  modified_base 29^30: mod_base = OTHER; note = Methylphosphonate linkage
  misc_feature 1..32: note = RM115150

SEQ ID NO: 506 - DNA, 32 bp, synthetic construct; identical to SEQ ID NO: 74
  source 1..32: mol_type = other DNA
  misc_feature 25..26: note = DNA
  misc_feature order(1..24,27..32): note = RNA
  modified_base 24: mod_base = OTHER; note = 2-Prime-O-Methoxyethyl modified 5-methyl Uridine
  modified_base 25: mod_base = OTHER; note = DNA nucleotide carrying a 6-amino-5-nitro-3-yl-2(1H)-pyridone nucleobase
  modified_base order(16,19,21..22,28..29): mod_base = OTHER; note = 2-Prime-Fluoro modified nucleoside
  modified_base order(1..15,17..18,20,23,27,30..32): mod_base = OTHER; note = 2-Prime-O-Methyl modified nucleoside
  modified_base order(1^2,31^32): mod_base = OTHER; note = (1,3-dimethylimidazolidin-2-ylidene) Phosphoramidate linkage
  modified_base order(2..26,27..31): mod_base = OTHER; note = Phosphorothioate linkage
  modified_base 26^27: mod_base = OTHER; note = Methylphosphonate linkage
  misc_feature 1..32: note = RM115151

SEQ ID NO: 507 - DNA, 32 bp, synthetic construct; identical to SEQ ID NO: 75
  source 1..32: mol_type = other DNA
  misc_feature 22..23: note = DNA
  misc_feature order(1..21,24..32): note = RNA
  modified_base 21: mod_base = OTHER; note = 2-Prime-O-Methoxyethyl modified 5-methyl Uridine
  modified_base 22: mod_base = OTHER; note = DNA nucleotide carrying a 6-amino-5-nitro-3-yl-2(1H)-pyridone nucleobase
  modified_base order(13,16,18..19,25..26): mod_base = OTHER; note = 2-Prime-Fluoro modified nucleoside
  modified_base order(1..12,14..15,17,20,24,27..32): mod_base = OTHER; note = 2-Prime-O-Methyl modified nucleoside
  modified_base order(1^2,31^32): mod_base = OTHER; note = (1,3-dimethylimidazolidin-2-ylidene) Phosphoramidate linkage
  modified_base order(2..23,24..31): mod_base = OTHER; note = Phosphorothioate linkage
  modified_base 23^24: mod_base = OTHER; note = Methylphosphonate linkage
  misc_feature 1..32: note = RM115152

SEQ ID NO: 508 - DNA, 32 bp, synthetic construct; identical to SEQ ID NO: 76
  source 1..32: mol_type = other DNA
  misc_feature 19..20: note = DNA
  misc_feature order(1..18,21..32): note = RNA
  modified_base 18: mod_base = OTHER; note = 2-Prime-O-Methoxyethyl modified 5-methyl Uridine
  modified_base 19: mod_base = OTHER; note = DNA nucleotide carrying a 6-amino-5-nitro-3-yl-2(1H)-pyridone nucleobase
  modified_base order(10,13,15..16,22..23): mod_base = OTHER; note = 2-Prime-Fluoro modified nucleoside
  modified_base order(1..9,11..12,14,17,21,24..32): mod_base = OTHER; note = 2-Prime-O-Methyl modified nucleoside
  modified_base order(1^2,31^32): mod_base = OTHER; note = (1,3-dimethylimidazolidin-2-ylidene) Phosphoramidate linkage
  modified_base order(2..20,21..31): mod_base = OTHER; note = Phosphorothioate linkage
  modified_base 20^21: mod_base = OTHER; note = Methylphosphonate linkage
  misc_feature 1..32: note = RM115153

SEQ ID NO: 509 - DNA, 32 bp, synthetic construct; identical to SEQ ID NO: 77
  source 1..32: mol_type = other DNA
  misc_feature 16..17: note = DNA
  misc_feature order(1..15,18..32): note = RNA
  modified_base 15: mod_base = OTHER; note = 2-Prime-O-Methoxyethyl modified 5-methyl Uridine
  modified_base 16: mod_base = OTHER; note = DNA nucleotide carrying a 6-amino-5-nitro-3-yl-2(1H)-pyridone nucleobase
  modified_base order(7,10,12..13,19..20): mod_base = OTHER; note = 2-Prime-Fluoro modified nucleoside
  modified_base order(1..6,8..9,11,14,18,21..32): mod_base = OTHER; note = 2-Prime-O-Methyl modified nucleoside
  modified_base order(1^2,31^32): mod_base = OTHER; note = (1,3-dimethylimidazolidin-2-ylidene) Phosphoramidate linkage
  modified_base order(2..17,18..31): mod_base = OTHER; note = Phosphorothioate linkage
  modified_base 17^18: mod_base = OTHER; note = Methylphosphonate linkage
  misc_feature 1..32: note = RM115154

SEQ ID NO: 510 - DNA, 32 bp, synthetic construct; identical to SEQ ID NO: 78
  source 1..32: mol_type = other DNA
  misc_feature 13..14: note = DNA
  misc_feature order(1..12,15..32): note = RNA
  modified_base 12: mod_base = OTHER; note = 2-Prime-O-Methoxyethyl modified 5-methyl Uridine
  modified_base 13: mod_base = OTHER; note = DNA nucleotide carrying a 6-amino-5-nitro-3-yl-2(1H)-pyridone nucleobase
  modified_base order(4,7,9..10,16..17): mod_base = OTHER; note = 2-Prime-Fluoro modified nucleoside
  modified_base order(1..3,5..6,8,11,15,18..32): mod_base = OTHER; note = 2-Prime-O-Methyl modified nucleoside
  modified_base order(1^2,31^32): mod_base = OTHER; note = (1,3-dimethylimidazolidin-2-ylidene) Phosphoramidate linkage
  modified_base order(2..14,15..31): mod_base = OTHER; note = Phosphorothioate linkage
  modified_base 14^15: mod_base = OTHER; note = Methylphosphonate linkage
  misc_feature 1..32: note = RM115155

SEQ ID NO: 511 - DNA, 32 bp, synthetic construct; identical to SEQ ID NO: 79
  source 1..32: mol_type = other DNA
  misc_feature 10..11: note = DNA
  misc_feature order(1..9,12..32): note = RNA
  modified_base 9: mod_base = OTHER; note = 2-Prime-O-Methoxyethyl modified 5-methyl Uridine
  modified_base 10: mod_base = OTHER; note = DNA nucleotide carrying a 6-amino-5-nitro-3-yl-2(1H)-pyridone nucleobase
  modified_base order(1,4,6..7,13..14): mod_base = OTHER; note = 2-Prime-Fluoro modified nucleoside
  modified_base order(2..3,5,8,12,15..32): mod_base = OTHER; note = 2-Prime-O-Methyl modified nucleoside
  modified_base order(1^2,31^32): mod_base = OTHER; note = (1,3-dimethylimidazolidin-2-ylidene) Phosphoramidate linkage
  modified_base order(2..11,12..31): mod_base = OTHER; note = Phosphorothioate linkage
  modified_base 11^12: mod_base = OTHER; note = Methylphosphonate linkage
  misc_feature 1..32: note = RM115156

SEQ ID NO: 512 - DNA, 23 bp, synthetic construct
  source 1..23: mol_type = other DNA
  misc_feature 12..13: note = DNA
  misc_feature order(1..11,14..23): note = RNA
  modified_base 11: mod_base = OTHER; note = 2-Prime-O-Methoxyethyl modified 5-methyl Uridine
  modified_base 12: mod_base = OTHER; note = DNA nucleotide carrying a 6-amino-5-nitro-3-yl-2(1H)-pyridone nucleobase
  modified_base order(10,15,17..18,20,23): mod_base = OTHER; note = 2-Prime-Fluoro modified nucleoside
  modified_base order(1..9,14,16,19,21..22): mod_base = OTHER; note = 2-Prime-O-Methyl modified nucleoside
  modified_base order(1^2,22^23): mod_base = OTHER; note = (1,3-dimethylimidazolidin-2-ylidene) Phosphoramidate linkage
  modified_base order(2..13,14..22): mod_base = OTHER; note = Phosphorothioate linkage
  modified_base 13^14: mod_base = OTHER; note = Methylphosphonate linkage
  misc_feature 1..23: note = RM115157
gcccttcgtctnatggacaaagt

SEQ ID NO: 513 - DNA, 23 bp, synthetic construct
  source 1..23: mol_type = other DNA
  misc_feature 9..10: note = DNA
  misc_feature order(1..8,11..23): note = RNA
  modified_base 8: mod_base = OTHER; note = 2-Prime-O-Methoxyethyl modified 5-methyl Uridine
  modified_base 9: mod_base = OTHER; note = DNA nucleotide carrying a 6-amino-5-nitro-3-yl-2(1H)-pyridone nucleobase
  modified_base order(7,12,14..15,17,20): mod_base = OTHER; note = 2-Prime-Fluoro modified nucleoside
  modified_base order(1..6,11,13,16,18..19,21..23): mod_base = OTHER; note = 2-Prime-O-Methyl modified nucleoside
  modified_base order(1^2,22^23): mod_base = OTHER; note = (1,3-dimethylimidazolidin-2-ylidene) Phosphoramidate linkage
  modified_base order(2..10,11..22): mod_base = OTHER; note = Phosphorothioate linkage
  modified_base 10^11: mod_base = OTHER; note = Methylphosphonate linkage
  misc_feature 1..23: note = RM115158
cttcgtctnatggacaaagtctt

SEQ ID NO: 514 - DNA, 23 bp, synthetic construct
  source 1..23: mol_type = other DNA
  misc_feature 6..7: note = DNA
  misc_feature order(1..5,8..23): note = RNA
  modified_base 5: mod_base = OTHER; note = 2-Prime-O-Methoxyethyl modified 5-methyl Uridine
  modified_base 6: mod_base = OTHER; note = DNA nucleotide carrying a 6-amino-5-nitro-3-yl-2(1H)-pyridone nucleobase
  modified_base order(4,9,11..12,14,17): mod_base = OTHER; note = 2-Prime-Fluoro modified nucleoside
  modified_base order(1..3,8,10,13,15..16,18..23): mod_base = OTHER; note = 2-Prime-O-Methyl modified nucleoside
  modified_base order(1^2,22^23): mod_base = OTHER; note = (1,3-dimethylimidazolidin-2-ylidene) Phosphoramidate linkage
  modified_base order(2..7,8..22): mod_base = OTHER; note = Phosphorothioate linkage
  modified_base 7^8: mod_base = OTHER; note = Methylphosphonate linkage
  misc_feature 1..23: note = RM115159
cgtctnatggacaaagtctttaa

SEQ ID NO: 515 - DNA, 32 bp, synthetic construct; identical to SEQ ID NO: 76
  source 1..32: mol_type = other DNA
  misc_feature 19..20: note = DNA
  misc_feature order(1..18,21..32): note = RNA
  modified_base 18: mod_base = OTHER; note = 2-Prime-O-Methoxyethyl modified 5-methyl Uridine
  modified_base 19: mod_base = OTHER; note = DNA nucleotide carrying a 6-amino-5-nitro-3-yl-2(1H)-pyridone nucleobase
  modified_base order(17,22,24..25,27,30): mod_base = OTHER; note = 2-Prime-Fluoro modified nucleoside
  modified_base order(1..16,21,23,26,28..29,31..32): mod_base = OTHER; note = 2-Prime-O-Methyl modified nucleoside
  modified_base order(1^2,31^32): mod_base = OTHER; note = (1,3-dimethylimidazolidin-2-ylidene) Phosphoramidate linkage
  modified_base order(2..20,21..31): mod_base = OTHER; note = Phosphorothioate linkage
  modified_base 20^21: mod_base = OTHER; note = Methylphosphonate linkage
  misc_feature 1..32: note = RM115160

SEQ ID NO: 516 - DNA, 32 bp, synthetic construct; identical to SEQ ID NO: 77
  source 1..32: mol_type = other DNA
  misc_feature 16..17: note = DNA
  misc_feature order(1..15,18..32): note = RNA
  modified_base 15: mod_base = OTHER; note = 2-Prime-O-Methoxyethyl modified 5-methyl Uridine
  modified_base 16: mod_base = OTHER; note = DNA nucleotide carrying a 6-amino-5-nitro-3-yl-2(1H)-pyridone nucleobase
  modified_base order(14,19,21..22,24,27): mod_base = OTHER; note = 2-Prime-Fluoro modified nucleoside
  modified_base order(1..13,18,20,23,25..26,28..32): mod_base = OTHER; note = 2-Prime-O-Methyl modified nucleoside
  modified_base order(1^2,31^32): mod_base = OTHER; note = (1,3-dimethylimidazolidin-2-ylidene) Phosphoramidate linkage
  modified_base order(2..17,18..31): mod_base = OTHER; note = Phosphorothioate linkage
  modified_base 17^18: mod_base = OTHER; note = Methylphosphonate linkage
  misc_feature 1..32: note = RM115161

SEQ ID NO: 517 - DNA, 32 bp, synthetic construct; identical to SEQ ID NO: 78
  source 1..32: mol_type = other DNA
  misc_feature 13..14: note = DNA
  misc_feature order(1..12,15..32): note = RNA
  modified_base 12: mod_base = OTHER; note = 2-Prime-O-Methoxyethyl modified 5-methyl Uridine
  modified_base 13: mod_base = OTHER; note = DNA nucleotide carrying a 6-amino-5-nitro-3-yl-2(1H)-pyridone nucleobase
  modified_base order(11,16,18..19,21,24): mod_base = OTHER; note = 2-Prime-Fluoro modified nucleoside
  modified_base order(1..10,15,17,20,22..23,25..32): mod_base = OTHER; note = 2-Prime-O-Methyl modified nucleoside
  modified_base order(1^2,31^32): mod_base = OTHER; note = (1,3-dimethylimidazolidin-2-ylidene) Phosphoramidate linkage
  modified_base order(2..14,15..31): mod_base = OTHER; note = Phosphorothioate linkage
  modified_base 14^15: mod_base = OTHER; note = Methylphosphonate linkage
  misc_feature 1..32: note = RM115162

SEQ ID NO: 518 - DNA, 32 bp, synthetic construct; identical to SEQ ID NO: 79
  source 1..32: mol_type = other DNA
  misc_feature 10..11: note = DNA
  misc_feature order(1..9,12..32): note = RNA
  modified_base 9: mod_base = OTHER; note = 2-Prime-O-Methoxyethyl modified 5-methyl Uridine
  modified_base 10: mod_base = OTHER; note = DNA nucleotide carrying a 6-amino-5-nitro-3-yl-2(1H)-pyridone nucleobase
  modified_base order(8,13,15..16,18,21): mod_base = OTHER; note = 2-Prime-Fluoro modified nucleoside
  modified_base order(1..7,12,14,17,19..20,22..32): mod_base = OTHER; note = 2-Prime-O-Methyl modified nucleoside
  modified_base order(1^2,31^32): mod_base = OTHER; note = (1,3-dimethylimidazolidin-2-ylidene) Phosphoramidate linkage
  modified_base order(2..11,12..31): mod_base = OTHER; note = Phosphorothioate linkage
  modified_base 11^12: mod_base = OTHER; note = Methylphosphonate linkage
  misc_feature 1..32: note = RM115163

SEQ ID NO: 519 - DNA, 32 bp, synthetic construct; identical to SEQ ID NO: 80
  source 1..32: mol_type = other DNA
  misc_feature 7..8: note = DNA
  misc_feature order(1..6,9..32): note = RNA
  modified_base 6: mod_base = OTHER; note = 2-Prime-O-Methoxyethyl modified 5-methyl Uridine
  modified_base 7: mod_base = OTHER; note = DNA nucleotide carrying a 6-amino-5-nitro-3-yl-2(1H)-pyridone nucleobase
  modified_base order(5,10,12..13,15,18): mod_base = OTHER; note = 2-Prime-Fluoro modified nucleoside
  modified_base order(1..4,9,11,14,16..17,19..32): mod_base = OTHER; note = 2-Prime-O-Methyl modified nucleoside
  modified_base order(1^2,31^32): mod_base = OTHER; note = (1,3-dimethylimidazolidin-2-ylidene) Phosphoramidate linkage
  modified_base order(2..8,9..31): mod_base = OTHER; note = Phosphorothioate linkage
  modified_base 8^9: mod_base = OTHER; note = Methylphosphonate linkage
  misc_feature 1..32: note = RM115164

SEQ ID NO: 520 - DNA, 32 bp, synthetic construct; identical to SEQ ID NO: 76
  source 1..32: mol_type = other DNA
  misc_feature 19..20: note = DNA
  misc_feature order(1..18,21..32): note = RNA
  modified_base 18: mod_base = OTHER; note = 2-Prime-O-Methoxyethyl modified 5-methyl Uridine
  modified_base 19: mod_base = OTHER; note = DNA nucleotide carrying a 6-amino-5-nitro-3-yl-2(1H)-pyridone nucleobase
  modified_base order(1,4,7,22..23,31): mod_base = OTHER; note = 2-Prime-Fluoro modified nucleoside
  modified_base order(2..3,5..6,8..17,21,24..30,32): mod_base = OTHER; note = 2-Prime-O-Methyl modified nucleoside
  modified_base order(1^2,31^32): mod_base = OTHER; note = (1,3-dimethylimidazolidin-2-ylidene) Phosphoramidate linkage
  modified_base order(2..20,21..31): mod_base = OTHER; note = Phosphorothioate linkage
  modified_base 20^21: mod_base = OTHER; note = Methylphosphonate linkage
  misc_feature 1..32: note = RM115165

SEQ ID NO: 521 - DNA, 23 bp, synthetic construct
  source 1..23: mol_type = other DNA
  misc_feature 18..19: note = DNA
  misc_feature order(1..17,20..23): note = RNA
  modified_base 17: mod_base = OTHER; note = 2-Prime-O-Methoxyethyl modified 5-methyl Uridine
  modified_base 18: mod_base = OTHER; note = DNA nucleotide carrying a 6-amino-5-nitro-3-yl-2(1H)-pyridone nucleobase
  modified_base order(3,6,21..22): mod_base = OTHER; note = 2-Prime-Fluoro modified nucleoside
  modified_base order(1..2,4..5,7..16,20,23): mod_base = OTHER; note = 2-Prime-O-Methyl modified nucleoside
  modified_base order(1^2,22^23): mod_base = OTHER; note = (1,3-dimethylimidazolidin-2-ylidene) Phosphoramidate linkage
  modified_base order(2..19,20..22): mod_base = OTHER; note = Phosphorothioate linkage
  modified_base 19^20: mod_base = OTHER; note = Methylphosphonate linkage
  misc_feature 1..23: note = RM115166
aatttggcccttcgtctnatgga

SEQ ID NO: 522 - DNA, 23 bp, synthetic construct
  source 1..23: mol_type = other DNA
  misc_feature 6..7: note = DNA
  misc_feature order(1..5,8..23): note = RNA
  modified_base 5: mod_base = OTHER; note = 2-Prime-O-Methoxyethyl modified 5-methyl Uridine
  modified_base 6: mod_base = OTHER; note = DNA nucleotide carrying a 6-amino-5-nitro-3-yl-2(1H)-pyridone nucleobase
  modified_base order(4,9,20,23): mod_base = OTHER; note = 2-Prime-Fluoro modified nucleoside
  modified_base order(1..3,8,10..19,21..22): mod_base = OTHER; note = 2-Prime-O-Methyl modified nucleoside
  modified_base order(1^2,22^23): mod_base = OTHER; note = (1,3-dimethylimidazolidin-2-ylidene) Phosphoramidate linkage
  modified_base order(2..7,8..22): mod_base = OTHER; note = Phosphorothioate linkage
  modified_base 7^8: mod_base = OTHER; note = Methylphosphonate linkage
  misc_feature 1..23: note = RM115167
cgtctnatggacaaagtctttaa

SEQ ID NO: 523 - DNA, 32 bp, synthetic construct; identical to SEQ ID NO: 75
  source 1..32: mol_type = other DNA
  misc_feature 22..23: note = DNA
  misc_feature order(1..21,24..32): note = RNA
  modified_base 21: mod_base = OTHER; note = 2-Prime-O-Methoxyethyl modified 5-methyl Uridine
  modified_base 22: mod_base = OTHER; note = DNA nucleotide carrying a 6-amino-5-nitro-3-yl-2(1H)-pyridone nucleobase
  modified_base order(12,15,18,20,25,27,29,31..32): mod_base = OTHER; note = 2-Prime-Fluoro modified nucleoside
  modified_base order(1..11,13..14,16..17,19,24,26,28,30): mod_base = OTHER; note = 2-Prime-O-Methyl modified nucleoside
  modified_base order(1^2,31^32): mod_base = OTHER; note = (1,3-dimethylimidazolidin-2-ylidene) Phosphoramidate linkage
  modified_base order(2..23,24..31): mod_base = OTHER; note = Phosphorothioate linkage
  modified_base 23^24: mod_base = OTHER; note = Methylphosphonate linkage
  misc_feature 1..32: note = RM115168

SEQ ID NO: 524 - DNA, 32 bp, synthetic construct; identical to SEQ ID NO: 76
  source 1..32: mol_type = other DNA
  misc_feature 19..20: note = DNA
  misc_feature order(1..18,21..32): note = RNA
  modified_base 18: mod_base = OTHER; note = 2-Prime-O-Methoxyethyl modified 5-methyl Uridine
  modified_base 19: mod_base = OTHER; note = DNA nucleotide carrying a 6-amino-5-nitro-3-yl-2(1H)-pyridone nucleobase
  modified_base order(9,12,15,17,22,24,26,28..29): mod_base = OTHER; note = 2-Prime-Fluoro modified nucleoside
  modified_base order(1..8,10..11,13..14,16,21,23,25,27,30..32): mod_base = OTHER; note = 2-Prime-O-Methyl modified nucleoside
  modified_base order(1^2,31^32): mod_base = OTHER; note = (1,3-dimethylimidazolidin-2-ylidene) Phosphoramidate linkage
  modified_base order(2..20,21..31): mod_base = OTHER; note = Phosphorothioate linkage
  modified_base 20^21: mod_base = OTHER; note = Methylphosphonate linkage
  misc_feature 1..32: note = RM115169

SEQ ID NO: 525 - DNA, 32 bp, synthetic construct; identical to SEQ ID NO: 77
  source 1..32: mol_type = other DNA
  misc_feature 16..17: note = DNA
  misc_feature order(1..15,18..32): note = RNA
  modified_base 15: mod_base = OTHER; note = 2-Prime-O-Methoxyethyl modified 5-methyl Uridine
  modified_base 16: mod_base = OTHER; note = DNA nucleotide carrying a 6-amino-5-nitro-3-yl-2(1H)-pyridone nucleobase
  modified_base order(6,9,12,14,19,21,23,25..26): mod_base = OTHER; note = 2-Prime-Fluoro modified nucleoside
  modified_base order(1..5,7..8,10..11,13,18,20,22,24,27..32): mod_base = OTHER; note = 2-Prime-O-Methyl modified nucleoside
  modified_base order(1^2,31^32): mod_base = OTHER; note = (1,3-dimethylimidazolidin-2-ylidene) Phosphoramidate linkage
  modified_base order(2..17,18..31): mod_base = OTHER; note = Phosphorothioate linkage
  modified_base 17^18: mod_base = OTHER; note = Methylphosphonate linkage
  misc_feature 1..32: note = RM115170

SEQ ID NO: 526 - DNA, 32 bp, synthetic construct; identical to SEQ ID NO: 78
  source 1..32: mol_type = other DNA
  misc_feature 13..14: note = DNA
  misc_feature order(1..12,15..32): note = RNA
  modified_base 12: mod_base = OTHER; note = 2-Prime-O-Methoxyethyl modified 5-methyl Uridine
  modified_base 13: mod_base = OTHER; note = DNA nucleotide carrying a 6-amino-5-nitro-3-yl-2(1H)-pyridone nucleobase
  modified_base order(3,6,9,11,16,18,20,22..23): mod_base = OTHER; note = 2-Prime-Fluoro modified nucleoside
  modified_base order(1..2,4..5,7..8,10,15,17,19,21,24..32): mod_base = OTHER; note = 2-Prime-O-Methyl modified nucleoside
  modified_base order(1^2,31^32): mod_base = OTHER; note = (1,3-dimethylimidazolidin-2-ylidene) Phosphoramidate linkage
  modified_base order(2..14,15..31): mod_base = OTHER; note = Phosphorothioate linkage
  modified_base 14^15: mod_base = OTHER; note = Methylphosphonate linkage
  misc_feature 1..32: note = RM115171

SEQ ID NO: 527 - DNA, 32 bp, synthetic construct; identical to SEQ ID NO: 76
  source 1..32: mol_type = other DNA
  misc_feature 19..20: note = DNA
  misc_feature order(1..18,21..32): note = RNA
  modified_base 18: mod_base = OTHER; note = 2-Prime-O-Methoxyethyl modified 5-methyl Uridine
  modified_base 19: mod_base = OTHER; note = DNA nucleotide carrying a 6-amino-5-nitro-3-yl-2(1H)-pyridone nucleobase
  modified_base order(11..12,14,16,22..23,25,28,31): mod_base = OTHER; note = 2-Prime-Fluoro modified nucleoside
  modified_base order(1..10,13,15,17,21,24,26..27,29..30,32): mod_base = OTHER; note = 2-Prime-O-Methyl modified nucleoside
  modified_base order(1^2,31^32): mod_base = OTHER; note = (1,3-dimethylimidazolidin-2-ylidene) Phosphoramidate linkage
  modified_base order(2..20,21..31): mod_base = OTHER; note = Phosphorothioate linkage
  modified_base 20^21: mod_base = OTHER; note = Methylphosphonate linkage
  misc_feature 1..32: note = RM115172

SEQ ID NO: 528 - DNA, 32 bp, synthetic construct; identical to SEQ ID NO: 77
  source 1..32: mol_type = other DNA
  misc_feature 16..17: note = DNA
  misc_feature order(1..15,18..32): note = RNA
  modified_base 15: mod_base = OTHER; note = 2-Prime-O-Methoxyethyl modified 5-methyl Uridine
  modified_base 16: mod_base = OTHER; note = DNA nucleotide carrying a 6-amino-5-nitro-3-yl-2(1H)-pyridone nucleobase
  modified_base order(8..9,11,13,19..20,22,25,28): mod_base = OTHER; note = 2-Prime-Fluoro modified nucleoside
  modified_base order(1..7,10,12,14,18,21,23..24,26..27,29..32): mod_base = OTHER; note = 2-Prime-O-Methyl modified nucleoside
  modified_base order(1^2,31^32): mod_base = OTHER; note = (1,3-dimethylimidazolidin-2-ylidene) Phosphoramidate linkage
  modified_base order(2..17,18..31): mod_base = OTHER; note = Phosphorothioate linkage
  modified_base 17^18: mod_base = OTHER; note = Methylphosphonate linkage
  misc_feature 1..32: note = RM115173

SEQ ID NO: 529 - DNA, 32 bp, synthetic construct; identical to SEQ ID NO: 78
  source 1..32: mol_type = other DNA
  misc_feature 13..14: note = DNA
  misc_feature order(1..12,15..32): note = RNA
  modified_base 12: mod_base = OTHER; note = 2-Prime-O-Methoxyethyl modified 5-methyl Uridine
  modified_base 13: mod_base = OTHER; note = DNA nucleotide carrying a 6-amino-5-nitro-3-yl-2(1H)-pyridone nucleobase
  modified_base order(5..6,8,10,16..17,19,22,25): mod_base = OTHER; note = 2-Prime-Fluoro modified nucleoside
  modified_base order(1..4,7,9,11,15,18,20..21,23..24,26..32): mod_base = OTHER; note = 2-Prime-O-Methyl modified nucleoside
  modified_base order(1^2,31^32): mod_base = OTHER; note = (1,3-dimethylimidazolidin-2-ylidene) Phosphoramidate linkage
  modified_base order(2..14,15..31): mod_base = OTHER; note = Phosphorothioate linkage
  modified_base 14^15: mod_base = OTHER; note = Methylphosphonate linkage
  misc_feature 1..32: note = RM115174

SEQ ID NO: 530 - DNA, 32 bp, synthetic construct; identical to SEQ ID NO: 79
  source 1..32: mol_type = other DNA
  misc_feature 10..11: note = DNA
  misc_feature order(1..9,12..32): note = RNA
  modified_base 9: mod_base = OTHER; note = 2-Prime-O-Methoxyethyl modified 5-methyl Uridine
  modified_base 10: mod_base = OTHER; note = DNA nucleotide carrying a 6-amino-5-nitro-3-yl-2(1H)-pyridone nucleobase
  modified_base order(2..3,5,7,13..14,16,19,22): mod_base = OTHER; note = 2-Prime-Fluoro modified nucleoside
  modified_base order(1,4,6,8,12,15,17..18,20..21,23..32): mod_base = OTHER; note = 2-Prime-O-Methyl modified nucleoside
  modified_base order(1^2,31^32): mod_base = OTHER; note = (1,3-dimethylimidazolidin-2-ylidene) Phosphoramidate linkage
  modified_base order(2..11,12..31): mod_base = OTHER; note = Phosphorothioate linkage
  modified_base 11^12: mod_base = OTHER; note = Methylphosphonate linkage
  misc_feature 1..32: note = RM115175

SEQ ID NO: 531 - DNA, 23 bp, synthetic construct
  source 1..23: mol_type = other DNA
  misc_feature 15..16: note = DNA
  misc_feature order(1..14,17..23): note = RNA
  modified_base 14: mod_base = OTHER; note = 2-Prime-O-Methoxyethyl modified 5-methyl Uridine
  modified_base 15: mod_base = OTHER; note = DNA nucleotide carrying a 6-amino-5-nitro-3-yl-2(1H)-pyridone nucleobase
  modified_base order(8,11,13,18,20,22): mod_base = OTHER; note = 2-Prime-Fluoro modified nucleoside
  modified_base order(1..7,9..10,12,17,19,21,23): mod_base = OTHER; note = 2-Prime-O-Methyl modified nucleoside
  modified_base order(1^2,22^23): mod_base = OTHER; note = (1,3-dimethylimidazolidin-2-ylidene) Phosphoramidate linkage
  modified_base order(2..16,17..22): mod_base = OTHER; note = Phosphorothioate linkage
  modified_base 16^17: mod_base = OTHER; note = Methylphosphonate linkage
  misc_feature 1..23: note = RM115176
ttggcccttcgtctnatggacaa

SEQ ID NO: 532 - DNA, 23 bp, synthetic construct
  source 1..23: mol_type = other DNA
  misc_feature 12..13: note = DNA
  misc_feature order(1..11,14..23): note = RNA
  modified_base 11: mod_base = OTHER; note = 2-Prime-O-Methoxyethyl modified 5-methyl Uridine
  modified_base 12: mod_base = OTHER; note = DNA nucleotide carrying a 6-amino-5-nitro-3-yl-2(1H)-pyridone nucleobase
  modified_base order(5,8,10,15,17,19): mod_base = OTHER; note = 2-Prime-Fluoro modified nucleoside
  modified_base order(1..4,6..7,9,14,16,18,20..23): mod_base = OTHER; note = 2-Prime-O-Methyl modified nucleoside
  modified_base order(1^2,22^23): mod_base = OTHER; note = (1,3-dimethylimidazolidin-2-ylidene) Phosphoramidate linkage
  modified_base order(2..13,14..22): mod_base = OTHER; note = Phosphorothioate linkage
  modified_base 13^14: mod_base = OTHER; note = Methylphosphonate linkage
  misc_feature 1..23: note = RM115177
gcccttcgtctnatggacaaagt

SEQ ID NO: 533 - DNA, 23 bp, synthetic construct
  source 1..23: mol_type = other DNA
  misc_feature 9..10: note = DNA
  misc_feature order(1..8,11..23): note = RNA
  modified_base 8: mod_base = OTHER; note = 2-Prime-O-Methoxyethyl modified 5-methyl Uridine
  modified_base 9: mod_base = OTHER; note = DNA nucleotide carrying a 6-amino-5-nitro-3-yl-2(1H)-pyridone nucleobase
  modified_base order(2,5,7,12,14,16): mod_base = OTHER; note = 2-Prime-Fluoro modified nucleoside
  modified_base order(1,3..4,6,11,13,15,17..23): mod_base = OTHER; note = 2-Prime-O-Methyl modified nucleoside
  modified_base order(1^2,22^23): mod_base = OTHER; note = (1,3-dimethylimidazolidin-2-ylidene) Phosphoramidate linkage
  modified_base order(2..10,11..22): mod_base = OTHER; note = Phosphorothioate linkage
  modified_base 10^11: mod_base = OTHER; note = Methylphosphonate linkage
  misc_feature 1..23: note = RM115178
cttcgtctnatggacaaagtctt

SEQ ID NO: 534 - DNA, 32 bp, synthetic construct; identical to SEQ ID NO: 74
  source 1..32: mol_type = other DNA
  misc_feature 25..26: note = DNA
  misc_feature order(1..24,27..32): note = RNA
  modified_base 24: mod_base = OTHER; note = 2-Prime-O-Methoxyethyl modified 5-methyl Uridine
  modified_base 25: mod_base = OTHER; note = DNA nucleotide carrying a 6-amino-5-nitro-3-yl-2(1H)-pyridone nucleobase
  modified_base order(18,21,23,28,30,32): mod_base = OTHER; note = 2-Prime-Fluoro modified nucleoside
  modified_base order(1..17,19..20,22,27,29,31): mod_base = OTHER; note = 2-Prime-O-Methyl modified nucleoside
  modified_base order(1^2,31^32): mod_base = OTHER; note = (1,3-dimethylimidazolidin-2-ylidene) Phosphoramidate linkage
  modified_base order(2..26,27..31): mod_base = OTHER; note = Phosphorothioate linkage
  modified_base 26^27: mod_base = OTHER; note = Methylphosphonate linkage
  misc_feature 1..32: note = RM115179

SEQ ID NO: 535 - DNA, 32 bp, synthetic construct; identical to SEQ ID NO: 75
  source 1..32: mol_type = other DNA
  misc_feature 22..23: note = DNA
  misc_feature order(1..21,24..32): note = RNA
  modified_base 21: mod_base = OTHER; note = 2-Prime-O-Methoxyethyl modified 5-methyl Uridine
  modified_base 22: mod_base = OTHER; note = DNA nucleotide carrying a 6-amino-5-nitro-3-yl-2(1H)-pyridone nucleobase
  modified_base order(15,18,20,25,27,29): mod_base = OTHER; note = 2-Prime-Fluoro modified nucleoside
  modified_base order(1..14,16..17,19,24,26,28,30..32): mod_base = OTHER; note = 2-Prime-O-Methyl modified nucleoside
  modified_base order(1^2,31^32): mod_base = OTHER; note = (1,3-dimethylimidazolidin-2-ylidene) Phosphoramidate linkage
  modified_base order(2..23,24..31): mod_base = OTHER; note = Phosphorothioate linkage
  modified_base 23^24: mod_base = OTHER; note = Methylphosphonate linkage
  misc_feature 1..32: note = RM115180

SEQ ID NO: 536 - DNA, 32 bp, synthetic construct; identical to SEQ ID NO: 76
  source 1..32: mol_type = other DNA
  misc_feature 19..20: note = DNA
  misc_feature order(1..18,21..32): note = RNA
  modified_base 18: mod_base = OTHER; note = 2-Prime-O-Methoxyethyl modified 5-methyl Uridine
  modified_base 19: mod_base = OTHER; note = DNA nucleotide carrying a 6-amino-5-nitro-3-yl-2(1H)-pyridone nucleobase
  modified_base order(12,15,17,22,24,26): mod_base = OTHER; note = 2-Prime-Fluoro modified nucleoside
  modified_base order(1..11,13..14,16,21,23,25,27..32): mod_base = OTHER; note = 2-Prime-O-Methyl modified nucleoside
  modified_base order(1^2,31^32): mod_base = OTHER; note = (1,3-dimethylimidazolidin-2-ylidene) Phosphoramidate linkage
  modified_base order(2..20,21..31): mod_base = OTHER; note = Phosphorothioate linkage
  modified_base 20^21: mod_base = OTHER; note = Methylphosphonate linkage
  misc_feature 1..32: note = RM115181

SEQ ID NO: 537 - DNA, 32 bp, synthetic construct; identical to SEQ ID NO: 77
  source 1..32: mol_type = other DNA
  misc_feature 16..17: note = DNA
  misc_feature order(1..15,18..32): note = RNA
  modified_base 15: mod_base = OTHER; note = 2-Prime-O-Methoxyethyl modified 5-methyl Uridine
  modified_base 16: mod_base = OTHER; note = DNA nucleotide carrying a 6-amino-5-nitro-3-yl-2(1H)-pyridone nucleobase
  modified_base order(9,12,14,19,21,23): mod_base = OTHER; note = 2-Prime-Fluoro modified nucleoside
  modified_base order(1..8,10..11,13,18,20,22,24..32): mod_base = OTHER; note = 2-Prime-O-Methyl modified nucleoside
  modified_base order(1^2,31^32): mod_base = OTHER; note = (1,3-dimethylimidazolidin-2-ylidene) Phosphoramidate linkage
  modified_base order(2..17,18..31): mod_base = OTHER; note = Phosphorothioate linkage
  modified_base 17^18: mod_base = OTHER; note = Methylphosphonate linkage
  misc_feature 1..32: note = RM115182

SEQ ID NO: 538 - DNA, 32 bp, synthetic construct; identical to SEQ ID NO: 78
  source 1..32: mol_type = other DNA
  misc_feature 13..14: note = DNA
  misc_feature order(1..12,15..32): note = RNA
  modified_base 12: mod_base = OTHER; note = 2-Prime-O-Methoxyethyl modified 5-methyl Uridine
  modified_base 13: mod_base = OTHER; note = DNA nucleotide carrying a 6-amino-5-nitro-3-yl-2(1H)-pyridone nucleobase
  modified_base order(6,9,11,16,18,20): mod_base = OTHER; note = 2-Prime-Fluoro modified nucleoside
  modified_base order(1..5,7..8,10,15,17,19,21..32): mod_base = OTHER; note = 2-Prime-O-Methyl modified nucleoside
  modified_base order(1^2,31^32): mod_base = OTHER; note = (1,3-dimethylimidazolidin-2-ylidene) Phosphoramidate linkage
  modified_base order(2..14,15..31): mod_base = OTHER; note = Phosphorothioate linkage
  modified_base 14^15: mod_base = OTHER; note = Methylphosphonate linkage
  misc_feature 1..32: note = RM115183

SEQ ID NO: 539 - DNA, 32 bp, synthetic construct; identical to SEQ ID NO: 79
  source 1..32: mol_type = other DNA
  misc_feature 10..11: note = DNA
  misc_feature order(1..9,12..32): note = RNA
  modified_base 9: mod_base = OTHER; note = 2-Prime-O-Methoxyethyl modified 5-methyl Uridine
  modified_base 10: mod_base = OTHER; note = DNA nucleotide carrying a 6-amino-5-nitro-3-yl-2(1H)-pyridone nucleobase
  modified_base order(3,6,8,13,15,17): mod_base = OTHER; note = 2-Prime-Fluoro modified nucleoside
  modified_base order(1..2,4..5,7,12,14,16,18..32): mod_base = OTHER; note = 2-Prime-O-Methyl modified nucleoside
  modified_base order(1^2,31^32): mod_base = OTHER; note = (1,3-dimethylimidazolidin-2-ylidene) Phosphoramidate linkage
  modified_base order(2..11,12..31): mod_base = OTHER; note = Phosphorothioate linkage
  modified_base 11^12: mod_base = OTHER; note = Methylphosphonate linkage
  misc_feature 1..32: note = RM115184

SEQ ID NO: 540 - DNA, 23 bp, synthetic construct
  source 1..23: mol_type = other DNA
  misc_feature 12..13: note = DNA
  misc_feature order(1..11,14..23): note = RNA
  modified_base 11: mod_base = OTHER; note = 2-Prime-O-Methoxyethyl modified 5-methyl Uridine
  modified_base 12: mod_base = OTHER; note = DNA nucleotide carrying a 6-amino-5-nitro-3-yl-2(1H)-pyridone nucleobase
  modified_base order(7,9,15..16,18,21): mod_base = OTHER; note = 2-Prime-Fluoro modified nucleoside
  modified_base order(1..6,8,10,14,17,19..20,22..23): mod_base = OTHER; note = 2-Prime-O-Methyl modified nucleoside
  modified_base order(1^2,22^23): mod_base = OTHER; note = (1,3-dimethylimidazolidin-2-ylidene) Phosphoramidate linkage
  modified_base order(2..13,14..22): mod_base = OTHER; note = Phosphorothioate linkage
  modified_base 13^14: mod_base = OTHER; note = Methylphosphonate linkage
  misc_feature 1..23: note = RM115185
gcccttcgtctnatggacaaagt

SEQ ID NO: 541 - DNA, 23 bp, synthetic construct
  source 1..23: mol_type = other DNA
  misc_feature 9..10: note = DNA
  misc_feature order(1..8,11..23): note = RNA
  modified_base 8: mod_base = OTHER; note = 2-Prime-O-Methoxyethyl modified 5-methyl Uridine
  modified_base 9: mod_base = OTHER; note = DNA nucleotide carrying a 6-amino-5-nitro-3-yl-2(1H)-pyridone nucleobase
  modified_base order(4,6,12..13,15,18): mod_base = OTHER; note = 2-Prime-Fluoro modified nucleoside
  modified_base order(1..3,5,7,11,14,16..17,19..23): mod_base = OTHER; note = 2-Prime-O-Methyl modified nucleoside
  modified_base order(1^2,22^23): mod_base = OTHER; note = (1,3-dimethylimidazolidin-2-ylidene) Phosphoramidate linkage
  modified_base order(2..10,11..22): mod_base = OTHER; note = Phosphorothioate linkage
  modified_base 10^11: mod_base = OTHER; note = Methylphosphonate linkage
  misc_feature 1..23: note = RM115186
cttcgtctnatggacaaagtctt

SEQ ID NO: 542 - DNA, 23 bp, synthetic construct
  source 1..23: mol_type = other DNA
  misc_feature 6..7: note = DNA
  misc_feature order(1..5,8..23): note = RNA
  modified_base 5: mod_base = OTHER; note = 2-Prime-O-Methoxyethyl modified 5-methyl Uridine
  modified_base 6: mod_base = OTHER; note = DNA nucleotide carrying a 6-amino-5-nitro-3-yl-2(1H)-pyridone nucleobase
  modified_base order(1,3,9..10,12,15): mod_base = OTHER; note = 2-Prime-Fluoro modified nucleoside
  modified_base order(2,4,8,11,13..14,16..23): mod_base = OTHER; note = 2-Prime-O-Methyl modified nucleoside
  modified_base order(1^2,22^23): mod_base = OTHER; note = (1,3-dimethylimidazolidin-2-ylidene) Phosphoramidate linkage
  modified_base order(2..7,8..22): mod_base = OTHER; note = Phosphorothioate linkage
  modified_base 7^8: mod_base = OTHER; note = Methylphosphonate linkage
  misc_feature 1..23: note = RM115187
cgtctnatggacaaagtctttaa

SEQ ID NO: 543 - DNA, 32 bp, synthetic construct; identical to SEQ ID NO: 75
  source 1..32: mol_type = other DNA
  misc_feature 22..23: note = DNA
  misc_feature order(1..21,24..32): note = RNA
  modified_base 21: mod_base = OTHER; note = 2-Prime-O-Methoxyethyl modified 5-methyl Uridine
  modified_base 22: mod_base = OTHER; note = DNA nucleotide carrying a 6-amino-5-nitro-3-yl-2(1H)-pyridone nucleobase
  modified_base order(17,19,25..26,28,31): mod_base = OTHER; note = 2-Prime-Fluoro modified nucleoside
  modified_base order(1..16,18,20,24,27,29..30,32): mod_base = OTHER; note = 2-Prime-O-Methyl modified nucleoside
  modified_base order(1^2,31^32): mod_base = OTHER; note = (1,3-dimethylimidazolidin-2-ylidene) Phosphoramidate linkage
  modified_base order(2..23,24..31): mod_base = OTHER; note = Phosphorothioate linkage
  modified_base 23^24: mod_base = OTHER; note = Methylphosphonate linkage
  misc_feature 1..32: note = RM115188

SEQ ID NO: 544 - DNA, 32 bp, synthetic construct; identical to SEQ ID NO: 76
  source 1..32: mol_type = other DNA
  misc_feature 19..20: note = DNA
  misc_feature order(1..18,21..32): note = RNA
  modified_base 18: mod_base = OTHER; note = 2-Prime-O-Methoxyethyl modified 5-methyl Uridine
  modified_base 19: mod_base = OTHER; note = DNA nucleotide carrying a 6-amino-5-nitro-3-yl-2(1H)-pyridone nucleobase
  modified_base order(14,16,22..23,25,28): mod_base = OTHER; note = 2-Prime-Fluoro modified nucleoside
  modified_base order(1..13,15,17,21,24,26..27,29..32): mod_base = OTHER; note = 2-Prime-O-Methyl modified nucleoside
  modified_base order(1^2,31^32): mod_base = OTHER; note = (1,3-dimethylimidazolidin-2-ylidene) Phosphoramidate linkage
  modified_base order(2..20,21..31): mod_base = OTHER; note = Phosphorothioate linkage
  modified_base 20^21: mod_base = OTHER; note = Methylphosphonate linkage
  misc_feature 1..32: note = RM115189

SEQ ID NO: 545 - DNA, 32 bp, synthetic construct; identical to SEQ ID NO: 77
  source 1..32: mol_type = other DNA
  misc_feature 16..17: note = DNA
  misc_feature order(1..15,18..32): note = RNA
  modified_base 15: mod_base = OTHER; note = 2-Prime-O-Methoxyethyl modified 5-methyl Uridine
  modified_base 16: mod_base = OTHER; note = DNA nucleotide carrying a 6-amino-5-nitro-3-yl-2(1H)-pyridone nucleobase
  modified_base order(11,13,19..20,22,25): mod_base = OTHER; note = 2-Prime-Fluoro modified nucleoside
  modified_base order(1..10,12,14,18,21,23..24,26..32): mod_base = OTHER; note = 2-Prime-O-Methyl modified nucleoside
  modified_base order(1^2,31^32): mod_base = OTHER; note = (1,3-dimethylimidazolidin-2-ylidene) Phosphoramidate linkage
  modified_base order(2..17,18..31): mod_base = OTHER; note = Phosphorothioate linkage
  modified_base 17^18: mod_base = OTHER; note = Methylphosphonate linkage
  misc_feature 1..32: note = RM115190

SEQ ID NO: 546 - DNA, 32 bp, synthetic construct; identical to SEQ ID NO: 78
  source 1..32: mol_type = other DNA
  misc_feature 13..14: note = DNA
  misc_feature order(1..12,15..32): note = RNA
  modified_base 12: mod_base = OTHER; note = 2-Prime-O-Methoxyethyl modified 5-methyl Uridine
  modified_base 13: mod_base = OTHER; note = DNA nucleotide carrying a 6-amino-5-nitro-3-yl-2(1H)-pyridone nucleobase
  modified_base order(8,10,16..17,19,22): mod_base = OTHER; note = 2-Prime-Fluoro modified nucleoside
  modified_base order(1..7,9,11,15,18,20..21,23..32): mod_base = OTHER; note = 2-Prime-O-Methyl modified nucleoside
  modified_base order(1^2,31^32): mod_base = OTHER; note = (1,3-dimethylimidazolidin-2-ylidene) Phosphoramidate linkage
  modified_base order(2..14,15..31): mod_base = OTHER; note = Phosphorothioate linkage
  modified_base 14^15: mod_base = OTHER; note = Methylphosphonate linkage
  misc_feature 1..32: note = RM115191

SEQ ID NO: 547 - DNA, 32 bp, synthetic construct; identical to SEQ ID NO: 79
  source 1..32: mol_type = other DNA
  misc_feature 10..11: note = DNA
  misc_feature order(1..9,12..32): note = RNA
  modified_base 9: mod_base = OTHER; note = 2-Prime-O-Methoxyethyl modified 5-methyl Uridine
  modified_base 10: mod_base = OTHER; note = DNA nucleotide carrying a 6-amino-5-nitro-3-yl-2(1H)-pyridone nucleobase
  modified_base order(5,7,13..14,16,19): mod_base = OTHER; note = 2-Prime-Fluoro modified nucleoside
  modified_base order(1..4,6,8,12,15,17..18,20..32): mod_base = OTHER; note = 2-Prime-O-Methyl modified nucleoside
  modified_base order(1^2,31^32): mod_base = OTHER; note = (1,3-dimethylimidazolidin-2-ylidene) Phosphoramidate linkage
  modified_base order(2..11,12..31): mod_base = OTHER; note = Phosphorothioate linkage
  modified_base 11^12: mod_base = OTHER; note = Methylphosphonate linkage
  misc_feature 1..32: note = RM115192

SEQ ID NO: 548 - DNA, 32 bp, synthetic construct; identical to SEQ ID NO: 80
  source 1..32: mol_type = other DNA
  misc_feature 7..8: note = DNA
  misc_feature order(1..6,9..32): note = RNA
  modified_base 6: mod_base = OTHER; note = 2-Prime-O-Methoxyethyl modified 5-methyl Uridine
  modified_base 7: mod_base = OTHER; note = DNA nucleotide carrying a 6-amino-5-nitro-3-yl-2(1H)-pyridone nucleobase
  modified_base order(2,4,10..11,13,16): mod_base = OTHER; note = 2-Prime-Fluoro modified nucleoside
  modified_base order(1,3,5,9,12,14..15,17..32): mod_base = OTHER; note = 2-Prime-O-Methyl modified nucleoside
  modified_base order(1^2,31^32): mod_base = OTHER; note = (1,3-dimethylimidazolidin-2-ylidene) Phosphoramidate linkage
  modified_base order(2..8,9..31): mod_base = OTHER; note = Phosphorothioate linkage
  modified_base 8^9: mod_base = OTHER; note = Methylphosphonate linkage
  misc_feature 1..32: note = RM115193

SEQ ID NO: 549 - DNA, 32 bp, synthetic construct; identical to SEQ ID NO: 73
  source 1..32: mol_type = other DNA
  misc_feature 28..29: note = DNA
  misc_feature order(1..27,30..32): note = RNA
  modified_base 27: mod_base = OTHER; note = 2-Prime-O-Methoxyethyl modified 5-methyl Uridine
  modified_base 28: mod_base = OTHER; note = DNA nucleotide carrying a 6-amino-5-nitro-3-yl-2(1H)-pyridone nucleobase
  modified_base order(24,26,31): mod_base = OTHER; note = 2-Prime-Fluoro modified nucleoside
  modified_base order(1..23,25,30,32): mod_base = OTHER; note = 2-Prime-O-Methyl modified nucleoside
  modified_base order(1^2,31^32): mod_base = OTHER; note = (1,3-dimethylimidazolidin-2-ylidene) Phosphoramidate linkage
  modified_base order(2..29,30^31): mod_base = OTHER; note = Phosphorothioate linkage
  modified_base 29^30: mod_base = OTHER; note = Methylphosphonate linkage
  misc_feature 1..32: note = RM115194

SEQ ID NO: 550 - DNA, 32 bp, synthetic construct; identical to SEQ ID NO: 74
  source 1..32: mol_type = other DNA
  misc_feature 25..26: note = DNA
  misc_feature order(1..24,27..32): note = RNA
  modified_base 24: mod_base = OTHER; note = 2-Prime-O-Methoxyethyl modified 5-methyl Uridine
  modified_base 25: mod_base = OTHER; note = DNA nucleotide carrying a 6-amino-5-nitro-3-yl-2(1H)-pyridone nucleobase
  modified_base order(21,23,28): mod_base = OTHER; note = 2-Prime-Fluoro modified nucleoside
  modified_base order(1..20,22,27,29..32): mod_base = OTHER; note = 2-Prime-O-Methyl modified nucleoside
  modified_base order(1^2,31^32): mod_base = OTHER; note = (1,3-dimethylimidazolidin-2-ylidene) Phosphoramidate linkage
  modified_base order(2..26,27..31): mod_base = OTHER; note = Phosphorothioate linkage
  modified_base 26^27: mod_base = OTHER; note = Methylphosphonate linkage
  misc_feature 1..32: note = RM115195

SEQ ID NO: 551 - DNA, 32 bp, synthetic construct; identical to SEQ ID NO: 75
  source 1..32: mol_type = other DNA
  misc_feature 22..23: note = DNA
  misc_feature order(1..21,24..32): note = RNA
  modified_base 21: mod_base = OTHER; note = 2-Prime-O-Methoxyethyl modified 5-methyl Uridine
  modified_base 22: mod_base = OTHER; note = DNA nucleotide carrying a 6-amino-5-nitro-3-yl-2(1H)-pyridone nucleobase
  modified_base order(18,20,25): mod_base = OTHER; note = 2-Prime-Fluoro modified nucleoside
  modified_base order(1..17,19,24,26..32): mod_base = OTHER; note = 2-Prime-O-Methyl modified nucleoside
  modified_base order(1^2,31^32): mod_base = OTHER; note = (1,3-dimethylimidazolidin-2-ylidene) Phosphoramidate linkage
  modified_base order(2..23,24..31): mod_base = OTHER; note = Phosphorothioate linkage
  modified_base 23^24: mod_base = OTHER; note = Methylphosphonate linkage
  misc_feature 1..32: note = RM115196

SEQ ID NO: 552 - DNA, 32 bp, synthetic construct; identical to SEQ ID NO: 76
  source 1..32: mol_type = other DNA
  misc_feature 19..20: note = DNA
  misc_feature order(1..18,21..32): note = RNA
  modified_base 18: mod_base = OTHER; note = 2-Prime-O-Methoxyethyl modified 5-methyl Uridine
  modified_base 19: mod_base = OTHER; note = DNA nucleotide carrying a 6-amino-5-nitro-3-yl-2(1H)-pyridone nucleobase
  modified_base order(15,17,22): mod_base = OTHER; note = 2-Prime-Fluoro modified nucleoside
  modified_base order(1..14,16,21,23..32): mod_base = OTHER; note = 2-Prime-O-Methyl modified nucleoside
  modified_base order(1^2,31^32): mod_base = OTHER; note = (1,3-dimethylimidazolidin-2-ylidene) Phosphoramidate linkage
  modified_base order(2..20,21..31): mod_base = OTHER; note = Phosphorothioate linkage
  modified_base 20^21: mod_base = OTHER; note = Methylphosphonate linkage
  misc_feature 1..32: note = RM115197

SEQ ID NO: 553 - DNA, 32 bp, synthetic construct; identical to SEQ ID NO: 77
  source 1..32: mol_type = other DNA
  misc_feature 16..17: note = DNA
  misc_feature order(1..15,18..32): note = RNA
  modified_base 15: mod_base = OTHER; note = 2-Prime-O-Methoxyethyl modified 5-methyl Uridine
  modified_base 16: mod_base = OTHER; note = DNA nucleotide carrying a 6-amino-5-nitro-3-yl-2(1H)-pyridone nucleobase
  modified_base order(12,14,19): mod_base = OTHER; note = 2-Prime-Fluoro modified nucleoside
  modified_base order(1..11,13,18,20..32): mod_base = OTHER; note = 2-Prime-O-Methyl modified nucleoside
  modified_base order(1^2,31^32): mod_base = OTHER; note = (1,3-dimethylimidazolidin-2-ylidene) Phosphoramidate linkage
  modified_base order(2..17,18..31): mod_base = OTHER; note = Phosphorothioate linkage
  modified_base 17^18: mod_base = OTHER; note = Methylphosphonate linkage
  misc_feature 1..32: note = RM115198

SEQ ID NO: 554 - DNA, 32 bp, synthetic construct; identical to SEQ ID NO: 78
  source 1..32: mol_type = other DNA
  misc_feature 13..14: note = DNA
  misc_feature order(1..12,15..32): note = RNA
  modified_base 12: mod_base = OTHER; note = 2-Prime-O-Methoxyethyl modified 5-methyl Uridine
  modified_base 13: mod_base = OTHER; note = DNA nucleotide carrying a 6-amino-5-nitro-3-yl-2(1H)-pyridone nucleobase
  modified_base order(9,11,16): mod_base = OTHER; note = 2-Prime-Fluoro modified nucleoside
  modified_base order(1..8,10,15,17..32): mod_base = OTHER; note = 2-Prime-O-Methyl modified nucleoside
  modified_base order(1^2,31^32): mod_base = OTHER; note = (1,3-dimethylimidazolidin-2-ylidene) Phosphoramidate linkage
  modified_base order(2..14,15..31): mod_base = OTHER; note = Phosphorothioate linkage
  modified_base 14^15: mod_base = OTHER; note = Methylphosphonate linkage
  misc_feature 1..32: note = RM115199

SEQ ID NO: 555 - DNA, 32 bp, synthetic construct; identical to SEQ ID NO: 79
  source 1..32: mol_type = other DNA
  misc_feature 10..11: note = DNA
  misc_feature order(1..9,12..32): note = RNA
  modified_base 9: mod_base = OTHER; note = 2-Prime-O-Methoxyethyl modified 5-methyl Uridine
  modified_base 10: mod_base = OTHER; note = DNA nucleotide carrying a 6-amino-5-nitro-3-yl-2(1H)-pyridone nucleobase
  modified_base order(6,8,13): mod_base = OTHER; note = 2-Prime-Fluoro modified nucleoside
  modified_base order(1..5,7,12,14..32): mod_base = OTHER; note = 2-Prime-O-Methyl modified nucleoside
  modified_base order(1^2,31^32): mod_base = OTHER; note = (1,3-dimethylimidazolidin-2-ylidene) Phosphoramidate linkage
  modified_base order(2..11,12..31): mod_base = OTHER; note = Phosphorothioate linkage
  modified_base 11^12: mod_base = OTHER; note = Methylphosphonate linkage
  misc_feature 1..32: note = RM115200

SEQ ID NO: 556 - DNA, 32 bp, synthetic construct; identical to SEQ ID NO: 80
  source 1..32: mol_type = other DNA
  misc_feature 7..8: note = DNA
  misc_feature order(1..6,9..32): note = RNA
  modified_base 6: mod_base = OTHER; note = 2-Prime-O-Methoxyethyl modified 5-methyl Uridine
  modified_base 7: mod_base = OTHER; note = DNA nucleotide carrying a 6-amino-5-nitro-3-yl-2(1H)-pyridone nucleobase
  modified_base order(3,5,10): mod_base = OTHER; note = 2-Prime-Fluoro modified nucleoside
  modified_base order(1..2,4,9,11..32): mod_base = OTHER; note = 2-Prime-O-Methyl modified nucleoside
  modified_base order(1^2,31^32): mod_base = OTHER; note = (1,3-dimethylimidazolidin-2-ylidene) Phosphoramidate linkage
  modified_base order(2..8,9..31): mod_base = OTHER; note = Phosphorothioate linkage
  modified_base 8^9: mod_base = OTHER; note = Methylphosphonate linkage
  misc_feature 1..32: note = RM115201

SEQ ID NO: 557 - DNA, 23 bp, synthetic construct
  source 1..23: mol_type = other DNA
  misc_feature 18..19: note = DNA
  misc_feature order(1..17,20..23): note = RNA
  modified_base 17: mod_base = OTHER; note = 2-Prime-O-Methoxyethyl modified 5-methyl Uridine
  modified_base 18: mod_base = OTHER; note = DNA nucleotide carrying a 6-amino-5-nitro-3-yl-2(1H)-pyridone nucleobase
  modified_base order(6,11..12,14,21,23): mod_base = OTHER; note = 2-Prime-Fluoro modified nucleoside
  modified_base order(1..5,7..10,13,15..16,20,22): mod_base = OTHER; note = 2-Prime-O-Methyl modified nucleoside
  modified_base order(1^2,22^23): mod_base = OTHER; note = (1,3-dimethylimidazolidin-2-ylidene) Phosphoramidate linkage
  modified_base order(2..19,20..22): mod_base = OTHER; note = Phosphorothioate linkage
  modified_base 19^20: mod_base = OTHER; note = Methylphosphonate linkage
  misc_feature 1..23: note = RM115202
aatttggcccttcgtctnatgga

SEQ ID NO: 558 - DNA, 23 bp, synthetic construct
  source 1..23: mol_type = other DNA
  misc_feature 15..16: note = DNA
  misc_feature order(1..14,17..23): note = RNA
  modified_base 14: mod_base = OTHER; note = 2-Prime-O-Methoxyethyl modified 5-methyl Uridine
  modified_base 15: mod_base = OTHER; note = DNA nucleotide carrying a 6-amino-5-nitro-3-yl-2(1H)-pyridone nucleobase
  modified_base order(3,8..9,11,18,20): mod_base = OTHER; note = 2-Prime-Fluoro modified nucleoside
  modified_base order(1..2,4..7,10,12..13,17,19,21..23): mod_base = OTHER; note = 2-Prime-O-Methyl modified nucleoside
  modified_base order(1^2,22^23): mod_base = OTHER; note = (1,3-dimethylimidazolidin-2-ylidene) Phosphoramidate linkage
  modified_base order(2..16,17..22): mod_base = OTHER; note = Phosphorothioate linkage
  modified_base 16^17: mod_base = OTHER; note = Methylphosphonate linkage
  misc_feature 1..23: note = RM115203
ttggcccttcgtctnatggacaa

SEQ ID NO: 559 - DNA, 32 bp, synthetic construct; identical to SEQ ID NO: 74
  source 1..32: mol_type = other DNA
  misc_feature 25..26: note = DNA
  misc_feature order(1..24,27..32): note = RNA
  modified_base 24: mod_base = OTHER; note = 2-Prime-O-Methoxyethyl modified 5-methyl Uridine
  modified_base 25: mod_base = OTHER; note = DNA nucleotide carrying a 6-amino-5-nitro-3-yl-2(1H)-pyridone nucleobase
  modified_base order(13,18..19,21,28,30): mod_base = OTHER; note = 2-Prime-Fluoro modified nucleoside
  modified_base order(1..12,14..17,20,22..23,27,29,31..32): mod_base = OTHER; note = 2-Prime-O-Methyl modified nucleoside
  modified_base order(1^2,31^32): mod_base = OTHER; note = (1,3-dimethylimidazolidin-2-ylidene) Phosphoramidate linkage
  modified_base order(2..26,27..31): mod_base = OTHER; note = Phosphorothioate linkage
  modified_base 26^27: mod_base = OTHER; note = Methylphosphonate linkage
  misc_feature 1..32: note = RM115204

SEQ ID NO: 560 - DNA, 32 bp, synthetic construct; identical to SEQ ID NO: 75
  source 1..32: mol_type = other DNA
  misc_feature 22..23: note = DNA
  misc_feature order(1..21,24..32): note = RNA
  modified_base 21: mod_base = OTHER; note = 2-Prime-O-Methoxyethyl modified 5-methyl Uridine
  modified_base 22: mod_base = OTHER; note = DNA nucleotide carrying a 6-amino-5-nitro-3-yl-2(1H)-pyridone nucleobase
  modified_base order(10,15..16,18,25,27): mod_base = OTHER; note = 2-Prime-Fluoro modified nucleoside
  modified_base order(1..9,11..14,17,19..20,24,26,28..32): mod_base = OTHER; note = 2-Prime-O-Methyl modified nucleoside
  modified_base order(1^2,31^32): mod_base = OTHER; note = (1,3-dimethylimidazolidin-2-ylidene) Phosphoramidate linkage
  modified_base order(2..23,24..31): mod_base = OTHER; note = Phosphorothioate linkage
  modified_base 23^24: mod_base = OTHER; note = Methylphosphonate linkage
  misc_feature 1..32: note = RM115205

SEQ ID NO: 561 - DNA, 32 bp, synthetic construct; identical to SEQ ID NO: 76
  source 1..32: mol_type = other DNA
  misc_feature 19..20: note = DNA
  misc_feature order(1..18,21..32): note = RNA
  modified_base 18: mod_base = OTHER; note = 2-Prime-O-Methoxyethyl modified 5-methyl Uridine
  modified_base 19: mod_base = OTHER; note = DNA nucleotide carrying a 6-amino-5-nitro-3-yl-2(1H)-pyridone nucleobase
  modified_base order(7,12..13,15,22,24): mod_base = OTHER; note = 2-Prime-Fluoro modified nucleoside
  modified_base order(1..6,8..11,14,16..17,21,23,25..32): mod_base = OTHER; note = 2-Prime-O-Methyl modified nucleoside
  modified_base order(1^2,31^32): mod_base = OTHER; note = (1,3-dimethylimidazolidin-2-ylidene) Phosphoramidate linkage
  modified_base order(2..20,21..31): mod_base = OTHER; note = Phosphorothioate linkage
  modified_base 20^21: mod_base = OTHER; note = Methylphosphonate linkage
  misc_feature 1..32: note = RM115206

SEQ ID NO: 562 - DNA, 32 bp, synthetic construct; identical to SEQ ID NO: 77
  source 1..32: mol_type = other DNA
  misc_feature 16..17: note = DNA
  misc_feature order(1..15,18..32): note = RNA
  modified_base 15: mod_base = OTHER; note = 2-Prime-O-Methoxyethyl modified 5-methyl Uridine
  modified_base 16: mod_base = OTHER; note = DNA nucleotide carrying a 6-amino-5-nitro-3-yl-2(1H)-pyridone nucleobase
  modified_base order(4,9..10,12,19,21): mod_base = OTHER; note = 2-Prime-Fluoro modified nucleoside
  modified_base order(1..3,5..8,11,13..14,18,20,22..32): mod_base = OTHER; note = 2-Prime-O-Methyl modified nucleoside
  modified_base order(1^2,31^32): mod_base = OTHER; note = (1,3-dimethylimidazolidin-2-ylidene) Phosphoramidate linkage
  modified_base order(2..17,18..31): mod_base = OTHER; note = Phosphorothioate linkage
  modified_base 17^18: mod_base = OTHER; note = Methylphosphonate linkage
  misc_feature 1..32: note = RM115207

SEQ ID NO: 563 - DNA, 32 bp, synthetic construct; identical to SEQ ID NO: 78
  source 1..32: mol_type = other DNA
  misc_feature 13..14: note = DNA
  misc_feature order(1..12,15..32): note = RNA
  modified_base 12: mod_base = OTHER; note = 2-Prime-O-Methoxyethyl modified 5-methyl Uridine
  modified_base 13: mod_base = OTHER; note = DNA nucleotide carrying a 6-amino-5-nitro-3-yl-2(1H)-pyridone nucleobase
  modified_base order(1,6..7,9,16,18): mod_base = OTHER; note = 2-Prime-Fluoro modified nucleoside
  modified_base order(2..5,8,10..11,15,17,19..32): mod_base = OTHER; note = 2-Prime-O-Methyl modified nucleoside
  modified_base order(1^2,31^32): mod_base = OTHER; note = (1,3-dimethylimidazolidin-2-ylidene) Phosphoramidate linkage
  modified_base order(2..14,15..31): mod_base = OTHER; note = Phosphorothioate linkage
  modified_base 14^15: mod_base = OTHER; note = Methylphosphonate linkage
  misc_feature 1..32: note = RM115208

SEQ ID NO: 564 - DNA, 23 bp, synthetic construct
  source 1..23: mol_type = other DNA
  misc_feature 9..10: note = DNA
  misc_feature order(1..8,11..23): note = RNA
  modified_base 8: mod_base = OTHER; note = 2-Prime-O-Methoxyethyl modified 5-methyl Uridine
  modified_base 9: mod_base = OTHER; note = DNA nucleotide carrying a 6-amino-5-nitro-3-yl-2(1H)-pyridone nucleobase
  modified_base order(6,12,15,17..18,23): mod_base = OTHER; note = 2-Prime-Fluoro modified nucleoside
  modified_base order(1..5,7,11,13..14,16,19..22): mod_base = OTHER; note = 2-Prime-O-Methyl modified nucleoside
  modified_base order(1^2,22^23): mod_base = OTHER; note = (1,3-dimethylimidazolidin-2-ylidene) Phosphoramidate linkage
  modified_base order(2..10,11..22): mod_base = OTHER; note = Phosphorothioate linkage
  modified_base 10^11: mod_base = OTHER; note = Methylphosphonate linkage
  misc_feature 1..23: note = RM115209
cttcgtctnatggacaaagtctt

SEQ ID NO: 565 - DNA, 23 bp, synthetic construct
  source 1..23: mol_type = other DNA
  misc_feature 6..7: note = DNA
  misc_feature order(1..5,8..23): note = RNA
  modified_base 5: mod_base = OTHER; note = 2-Prime-O-Methoxyethyl modified 5-methyl Uridine
  modified_base 6: mod_base = OTHER; note = DNA nucleotide carrying a 6-amino-5-nitro-3-yl-2(1H)-pyridone nucleobase
  modified_base order(3,9,12,14..15,20): mod_base = OTHER; note = 2-Prime-Fluoro modified nucleoside
  modified_base order(1..2,4,8,10..11,13,16..19,21..23): mod_base = OTHER; note = 2-Prime-O-Methyl modified nucleoside
  modified_base order(1^2,22^23): mod_base = OTHER; note = (1,3-dimethylimidazolidin-2-ylidene) Phosphoramidate linkage
  modified_base order(2..7,8..22): mod_base = OTHER; note = Phosphorothioate linkage
  modified_base 7^8: mod_base = OTHER; note = Methylphosphonate linkage
  misc_feature 1..23: note = RM115210
cgtctnatggacaaagtctttaa

SEQ ID NO: 566 - DNA, 32 bp, synthetic construct; identical to SEQ ID NO: 77
  source 1..32: mol_type = other DNA
  misc_feature 16..17: note = DNA
  misc_feature order(1..15,18..32): note = RNA
  modified_base 15: mod_base = OTHER; note = 2-Prime-O-Methoxyethyl modified 5-methyl Uridine
  modified_base 16: mod_base = OTHER; note = DNA nucleotide carrying a 6-amino-5-nitro-3-yl-2(1H)-pyridone nucleobase
  modified_base order(13,19,22,24..25,30): mod_base = OTHER; note = 2-Prime-Fluoro modified nucleoside
  modified_base order(1..12,14,18,20..21,23,26..29,31..32): mod_base = OTHER; note = 2-Prime-O-Methyl modified nucleoside
  modified_base order(1^2,31^32): mod_base = OTHER; note = (1,3-dimethylimidazolidin-2-ylidene) Phosphoramidate linkage
  modified_base order(2..17,18..31): mod_base = OTHER; note = Phosphorothioate linkage
  modified_base 17^18: mod_base = OTHER; note = Methylphosphonate linkage
  misc_feature 1..32: note = RM115211

SEQ ID NO: 567 - DNA, 32 bp, synthetic construct; identical to SEQ ID NO: 78
  source 1..32: mol_type = other DNA
  misc_feature 13..14: note = DNA
  misc_feature order(1..12,15..32): note = RNA
  modified_base 12: mod_base = OTHER; note = 2-Prime-O-Methoxyethyl modified 5-methyl Uridine
  modified_base 13: mod_base = OTHER; note = DNA nucleotide carrying a 6-amino-5-nitro-3-yl-2(1H)-pyridone nucleobase
  modified_base order(10,16,19,21..22,27): mod_base = OTHER; note = 2-Prime-Fluoro modified nucleoside
  modified_base order(1..9,11,15,17..18,20,23..26,28..32): mod_base = OTHER; note = 2-Prime-O-Methyl modified nucleoside
  modified_base order(1^2,31^32): mod_base = OTHER; note = (1,3-dimethylimidazolidin-2-ylidene) Phosphoramidate linkage
  modified_base order(2..14,15..31): mod_base = OTHER; note = Phosphorothioate linkage
  modified_base 14^15: mod_base = OTHER; note = Methylphosphonate linkage
  misc_feature 1..32: note = RM115212

SEQ ID NO: 568 - DNA, 32 bp, synthetic construct; identical to SEQ ID NO: 79
  source 1..32: mol_type = other DNA
  misc_feature 10..11: note = DNA
  misc_feature order(1..9,12..32): note = RNA
  modified_base 9: mod_base = OTHER; note = 2-Prime-O-Methoxyethyl modified 5-methyl Uridine
  modified_base 10: mod_base = OTHER; note = DNA nucleotide carrying a 6-amino-5-nitro-3-yl-2(1H)-pyridone nucleobase
  modified_base order(7,13,16,18..19,24): mod_base = OTHER; note = 2-Prime-Fluoro modified nucleoside
  modified_base order(1..6,8,12,14..15,17,20..23,25..32): mod_base = OTHER; note = 2-Prime-O-Methyl modified nucleoside
  modified_base order(1^2,31^32): mod_base = OTHER; note = (1,3-dimethylimidazolidin-2-ylidene) Phosphoramidate linkage
  modified_base order(2..11,12..31): mod_base = OTHER; note = Phosphorothioate linkage
  modified_base 11^12: mod_base = OTHER; note = Methylphosphonate linkage
  misc_feature 1..32: note = RM115213

SEQ ID NO: 569 - DNA, 32 bp, synthetic construct; identical to SEQ ID NO: 80
  source 1..32: mol_type = other DNA
  misc_feature 7..8: note = DNA
  misc_feature order(1..6,9..32): note = RNA
  modified_base 6: mod_base = OTHER; note = 2-Prime-O-Methoxyethyl modified 5-methyl Uridine
  modified_base 7: mod_base = OTHER; note = DNA nucleotide carrying a 6-amino-5-nitro-3-yl-2(1H)-pyridone nucleobase
  modified_base order(4,10,13,15..16,21): mod_base = OTHER; note = 2-Prime-Fluoro modified nucleoside
  modified_base order(1..3,5,9,11..12,14,17..20,22..32): mod_base = OTHER; note = 2-Prime-O-Methyl modified nucleoside
  modified_base order(1^2,31^32): mod_base = OTHER; note = (1,3-dimethylimidazolidin-2-ylidene) Phosphoramidate linkage
  modified_base order(2..8,9..31): mod_base = OTHER; note = Phosphorothioate linkage
  modified_base 8^9: mod_base = OTHER; note = Methylphosphonate linkage
  misc_feature 1..32: note = RM115214

SEQ ID NO: 570 - DNA, 23 bp, synthetic construct
  source 1..23: mol_type = other DNA
  misc_feature 18..19: note = DNA
  misc_feature order(1..17,20..23): note = RNA
  modified_base 17: mod_base = OTHER; note = 2-Prime-O-Methoxyethyl modified 5-methyl Uridine
  modified_base 18: mod_base = OTHER; note = DNA nucleotide carrying a 6-amino-5-nitro-3-yl-2(1H)-pyridone nucleobase
  modified_base order(12,14,21,23): mod_base = OTHER; note = 2-Prime-Fluoro modified nucleoside
  modified_base order(1..11,13,15..16,20,22): mod_base = OTHER; note = 2-Prime-O-Methyl modified nucleoside
  modified_base order(1^2,22^23): mod_base = OTHER; note = (1,3-dimethylimidazolidin-2-ylidene) Phosphoramidate linkage
  modified_base order(2..19,20..22): mod_base = OTHER; note = Phosphorothioate linkage
  modified_base 19^20: mod_base = OTHER; note = Methylphosphonate linkage
  misc_feature 1..23: note = RM115215
aatttggcccttcgtctnatgga

SEQ ID NO: 571 - DNA, 23 bp, synthetic construct
  source 1..23: mol_type = other DNA
  misc_feature 15..16: note = DNA
  misc_feature order(1..14,17..23): note = RNA
  modified_base 14: mod_base = OTHER; note = 2-Prime-O-Methoxyethyl modified 5-methyl Uridine
  modified_base 15: mod_base = OTHER; note = DNA nucleotide carrying a 6-amino-5-nitro-3-yl-2(1H)-pyridone nucleobase
  modified_base order(9,11,18,20): mod_base = OTHER; note = 2-Prime-Fluoro modified nucleoside
  modified_base order(1..8,10,12..13,17,19,21..23): mod_base = OTHER; note = 2-Prime-O-Methyl modified nucleoside
  modified_base order(1^2,22^23): mod_base = OTHER; note = (1,3-dimethylimidazolidin-2-ylidene) Phosphoramidate linkage
  modified_base order(2..16,17..22): mod_base = OTHER; note = Phosphorothioate linkage
  modified_base 16^17: mod_base = OTHER; note = Methylphosphonate linkage
  misc_feature 1..23: note = RM115216
ttggcccttcgtctnatggacaa

SEQ ID NO: 572 - DNA, 23 bp, synthetic construct
  source 1..23: mol_type = other DNA
  misc_feature 12..13: note = DNA
  misc_feature order(1..11,14..23): note = RNA
  modified_base 11: mod_base = OTHER; note = 2-Prime-O-Methoxyethyl modified 5-methyl Uridine
  modified_base 12: mod_base = OTHER; note = DNA nucleotide carrying a 6-amino-5-nitro-3-yl-2(1H)-pyridone nucleobase
  modified_base order(6,8,15,17): mod_base = OTHER; note = 2-Prime-Fluoro modified nucleoside
  modified_base order(1..5,7,9..10,14,16,18..23): mod_base = OTHER; note = 2-Prime-O-Methyl modified nucleoside
  modified_base order(1^2,22^23): mod_base = OTHER; note = (1,3-dimethylimidazolidin-2-ylidene) Phosphoramidate linkage
  modified_base order(2..13,14..22): mod_base = OTHER; note = Phosphorothioate linkage
  modified_base 13^14: mod_base = OTHER; note = Methylphosphonate linkage
  misc_feature 1..23: note = RM115217
gcccttcgtctnatggacaaagt

SEQ ID NO: 573 - DNA, 23 bp, synthetic construct
  source 1..23: mol_type = other DNA
  misc_feature 9..10: note = DNA
  misc_feature order(1..8,11..23): note = RNA
  modified_base 8: mod_base = OTHER; note = 2-Prime-O-Methoxyethyl modified 5-methyl Uridine
  modified_base 9: mod_base = OTHER; note = DNA nucleotide carrying a 6-amino-5-nitro-3-yl-2(1H)-pyridone nucleobase
  modified_base order(3,5,12,14): mod_base = OTHER; note = 2-Prime-Fluoro modified nucleoside
  modified_base order(1..2,4,6..7,11,13,15..23): mod_base = OTHER; note = 2-Prime-O-Methyl modified nucleoside
  modified_base order(1^2,22^23): mod_base = OTHER; note = (1,3-dimethylimidazolidin-2-ylidene) Phosphoramidate linkage
  modified_base order(2..10,11..22): mod_base = OTHER; note = Phosphorothioate linkage
  modified_base 10^11: mod_base = OTHER; note = Methylphosphonate linkage
  misc_feature 1..23: note = RM115218
cttcgtctnatggacaaagtctt

SEQ ID NO: 574 - DNA, 23 bp, synthetic construct
  source 1..23: mol_type = other DNA
  misc_feature 15..16: note = DNA
  misc_feature order(1..14,17..23): note = RNA
  modified_base 14: mod_base = OTHER; note = 2-Prime-O-Methoxyethyl modified 5-methyl Uridine
  modified_base 15: mod_base = OTHER; note = DNA nucleotide carrying a 6-amino-5-nitro-3-yl-2(1H)-pyridone nucleobase
  modified_base order(12,18,21,23): mod_base = OTHER; note = 2-Prime-Fluoro modified nucleoside
  modified_base order(1..11,13,17,19..20,22): mod_base = OTHER; note = 2-Prime-O-Methyl modified nucleoside
  modified_base order(1^2,22^23): mod_base = OTHER; note = (1,3-dimethylimidazolidin-2-ylidene) Phosphoramidate linkage
  modified_base order(2..16,17..22): mod_base = OTHER; note = Phosphorothioate linkage
  modified_base 16^17: mod_base = OTHER; note = Methylphosphonate linkage
  misc_feature 1..23: note = RM115219
ttggcccttcgtctnatggacaa

SEQ ID NO: 575 - DNA, 23 bp, synthetic construct
  source 1..23: mol_type = other DNA
  misc_feature 12..13: note = DNA
  misc_feature order(1..11,14..23): note = RNA
  modified_base 11: mod_base = OTHER; note = 2-Prime-O-Methoxyethyl modified 5-methyl Uridine
  modified_base 12: mod_base = OTHER; note = DNA nucleotide carrying a 6-amino-5-nitro-3-yl-2(1H)-pyridone nucleobase
  modified_base order(9,15,18,20): mod_base = OTHER; note = 2-Prime-Fluoro modified nucleoside
  modified_base order(1..8,10,14,16..17,19,21..23): mod_base = OTHER; note = 2-Prime-O-Methyl modified nucleoside
  modified_base order(1^2,22^23): mod_base = OTHER; note = (1,3-dimethylimidazolidin-2-ylidene) Phosphoramidate linkage
  modified_base order(2..13,14..22): mod_base = OTHER; note = Phosphorothioate linkage
  modified_base 13^14: mod_base = OTHER; note = Methylphosphonate linkage
  misc_feature 1..23: note = RM115220
gcccttcgtctnatggacaaagt

SEQ ID NO: 576 - DNA, 23 bp, synthetic construct
  source 1..23: mol_type = other DNA
  misc_feature 9..10: note = DNA
  misc_feature order(1..8,11..23): note = RNA
  modified_base 8: mod_base = OTHER; note = 2-Prime-O-Methoxyethyl modified 5-methyl Uridine
  modified_base 9: mod_base = OTHER; note = DNA nucleotide carrying a 6-amino-5-nitro-3-yl-2(1H)-pyridone nucleobase
  modified_base order(6,12,15,17): mod_base = OTHER; note = 2-Prime-Fluoro modified nucleoside
  modified_base order(1..5,7,11,13..14,16,18..23): mod_base = OTHER; note = 2-Prime-O-Methyl modified nucleoside
  modified_base order(1^2,22^23): mod_base = OTHER; note = (1,3-dimethylimidazolidin-2-ylidene) Phosphoramidate linkage
  modified_base order(2..10,11..22): mod_base = OTHER; note = Phosphorothioate linkage
  modified_base 10^11: mod_base = OTHER; note = Methylphosphonate linkage
  misc_feature 1..23: note = RM115221
cttcgtctnatggacaaagtctt

SEQ ID NO: 577 - DNA, 23 bp, synthetic construct
  source 1..23: mol_type = other DNA
  misc_feature 6..7: note = DNA
  misc_feature order(1..5,8..23): note = RNA
  modified_base 5: mod_base = OTHER; note = 2-Prime-O-Methoxyethyl modified 5-methyl Uridine
  modified_base 6: mod_base = OTHER; note = DNA nucleotide carrying a 6-amino-5-nitro-3-yl-2(1H)-pyridone nucleobase
  modified_base order(3,9,12,14): mod_base = OTHER; note = 2-Prime-Fluoro modified nucleoside
  modified_base order(1..2,4,8,10..11,13,15..23): mod_base = OTHER; note = 2-Prime-O-Methyl modified nucleoside
  modified_base order(1^2,22^23): mod_base = OTHER; note = (1,3-dimethylimidazolidin-2-ylidene) Phosphoramidate linkage
  modified_base order(2..7,8..22): mod_base = OTHER; note = Phosphorothioate linkage
  modified_base 7^8: mod_base = OTHER; note = Methylphosphonate linkage
  misc_feature 1..23: note = RM115222
cgtctnatggacaaagtctttaa

SEQ ID NO: 578 - DNA, 32 bp, synthetic construct; identical to SEQ ID NO: 80
  source 1..32: mol_type = other DNA
  misc_feature 7..8: note = DNA
  misc_feature order(1..6,9..32): note = RNA
  modified_base 6: mod_base = OTHER; note = 2-Prime-O-Methoxyethyl modified 5-methyl Uridine
  modified_base 7: mod_base = OTHER; note = DNA nucleotide carrying a 6-amino-5-nitro-3-yl-2(1H)-pyridone nucleobase
  modified_base order(5,10,12,15..17,20,23,31): mod_base = OTHER; note = 2-Prime-Fluoro modified nucleoside
  modified_base order(1..4,9,11,13..14,18..19,21..22,24..30,32): mod_base = OTHER; note = 2-Prime-O-Methyl modified nucleoside
  modified_base order(1^2,31^32): mod_base = OTHER; note = (1,3-dimethylimidazolidin-2-ylidene) Phosphoramidate linkage
  modified_base order(2..8,9..31): mod_base = OTHER; note = Phosphorothioate linkage
  modified_base 8^9: mod_base = OTHER; note = Methylphosphonate linkage
  misc_feature 1..32: note = RM115223

SEQ ID NO: 579 - DNA, 32 bp, synthetic construct; identical to SEQ ID NO: 73
  source 1..32: mol_type = other DNA
  misc_feature 28..29: note = DNA
  misc_feature order(1..27,30..32): note = RNA
  modified_base 27: mod_base = OTHER; note = 2-Prime-O-Methoxyethyl modified 5-methyl Uridine
  modified_base 28: mod_base = OTHER; note = DNA nucleotide carrying a 6-amino-5-nitro-3-yl-2(1H)-pyridone nucleobase
  modified_base order(6,14,17,20..22,25,31..32): mod_base = OTHER; note = 2-Prime-Fluoro modified nucleoside
  modified_base order(1..5,7..13,15..16,18..19,23..24,26,30): mod_base = OTHER; note = 2-Prime-O-Methyl modified nucleoside
  modified_base order(1^2,31^32): mod_base = OTHER; note = (1,3-dimethylimidazolidin-2-ylidene) Phosphoramidate linkage
  modified_base order(2..29,30^31): mod_base = OTHER; note = Phosphorothioate linkage
  modified_base 29^30: mod_base = OTHER; note = Methylphosphonate linkage
  misc_feature 1..32: note = RM115224

SEQ ID NO: 580 - DNA, 32 bp, synthetic construct; identical to SEQ ID NO: 74
  source 1..32: mol_type = other DNA
  misc_feature 25..26: note = DNA
  misc_feature order(1..24,27..32): note = RNA
  modified_base 24: mod_base = OTHER; note = 2-Prime-O-Methoxyethyl modified 5-methyl Uridine
  modified_base 25: mod_base = OTHER; note = DNA nucleotide carrying a 6-amino-5-nitro-3-yl-2(1H)-pyridone nucleobase
  modified_base order(3,11,14,17..19,22,28..29): mod_base = OTHER; note = 2-Prime-Fluoro modified nucleoside
  modified_base order(1..2,4..10,12..13,15..16,20..21,23,27,30..32): mod_base = OTHER; note = 2-Prime-O-Methyl modified nucleoside
  modified_base order(1^2,31^32): mod_base = OTHER; note = (1,3-dimethylimidazolidin-2-ylidene) Phosphoramidate linkage
  modified_base order(2..26,27..31): mod_base = OTHER; note = Phosphorothioate linkage
  modified_base 26^27: mod_base = OTHER; note = Methylphosphonate linkage
  misc_feature 1..32: note = RM115225

SEQ ID NO: 581 - DNA, 23 bp, synthetic construct
  source 1..23: mol_type = other DNA
  misc_feature 12..13: note = DNA
  misc_feature order(1..11,14..23): note = RNA
  modified_base 11: mod_base = OTHER; note = 2-Prime-O-Methoxyethyl modified 5-methyl Uridine
  modified_base 12: mod_base = OTHER; note = DNA nucleotide carrying a 6-amino-5-nitro-3-yl-2(1H)-pyridone nucleobase
  modified_base order(10,15,17,20..22): mod_base = OTHER; note = 2-Prime-Fluoro modified nucleoside
  modified_base order(1..9,14,16,18..19,23): mod_base = OTHER; note = 2-Prime-O-Methyl modified nucleoside
  modified_base order(1^2,22^23): mod_base = OTHER; note = (1,3-dimethylimidazolidin-2-ylidene) Phosphoramidate linkage
  modified_base order(2..13,14..22): mod_base = OTHER; note = Phosphorothioate linkage
  modified_base 13^14: mod_base = OTHER; note = Methylphosphonate linkage
  misc_feature 1..23: note = RM115226
gcccttcgtctnatggacaaagt

SEQ ID NO: 582 - DNA, 23 bp, synthetic construct
  source 1..23: mol_type = other DNA
  misc_feature 9..10: note = DNA
  misc_feature order(1..8,11..23): note = RNA
  modified_base 8: mod_base = OTHER; note = 2-Prime-O-Methoxyethyl modified 5-methyl Uridine
  modified_base 9: mod_base = OTHER; note = DNA nucleotide carrying a 6-amino-5-nitro-3-yl-2(1H)-pyridone nucleobase
  modified_base order(7,12,14,17..19): mod_base = OTHER; note = 2-Prime-Fluoro modified nucleoside
  modified_base order(1..6,11,13,15..16,20..23): mod_base = OTHER; note = 2-Prime-O-Methyl modified nucleoside
  modified_base order(1^2,22^23): mod_base = OTHER; note = (1,3-dimethylimidazolidin-2-ylidene) Phosphoramidate linkage
  modified_base order(2..10,11..22): mod_base = OTHER; note = Phosphorothioate linkage
  modified_base 10^11: mod_base = OTHER; note = Methylphosphonate linkage
  misc_feature 1..23: note = RM115227
cttcgtctnatggacaaagtctt

SEQ ID NO: 583 - DNA, 23 bp, synthetic construct
  source 1..23: mol_type = other DNA
  misc_feature 6..7: note = DNA
  misc_feature order(1..5,8..23): note = RNA
  modified_base 5: mod_base = OTHER; note = 2-Prime-O-Methoxyethyl modified 5-methyl Uridine
  modified_base 6: mod_base = OTHER; note = DNA nucleotide carrying a 6-amino-5-nitro-3-yl-2(1H)-pyridone nucleobase
  modified_base order(4,9,11,14..16): mod_base = OTHER; note = 2-Prime-Fluoro modified nucleoside
  modified_base order(1..3,8,10,12..13,17..23): mod_base = OTHER; note = 2-Prime-O-Methyl modified nucleoside
  modified_base order(1^2,22^23): mod_base = OTHER; note = (1,3-dimethylimidazolidin-2-ylidene) Phosphoramidate linkage
  modified_base order(2..7,8..22): mod_base = OTHER; note = Phosphorothioate linkage
  modified_base 7^8: mod_base = OTHER; note = Methylphosphonate linkage
  misc_feature 1..23: note = RM115228
cgtctnatggacaaagtctttaa

SEQ ID NO: 584 - DNA, 32 bp, synthetic construct; identical to SEQ ID NO: 75
  source 1..32: mol_type = other DNA
  misc_feature 22..23: note = DNA
  misc_feature order(1..21,24..32): note = RNA
  modified_base 21: mod_base = OTHER; note = 2-Prime-O-Methoxyethyl modified 5-methyl Uridine
  modified_base 22: mod_base = OTHER; note = DNA nucleotide carrying a 6-amino-5-nitro-3-yl-2(1H)-pyridone nucleobase
  modified_base order(20,25,27,30..32): mod_base = OTHER; note = 2-Prime-Fluoro modified nucleoside
  modified_base order(1..19,24,26,28..29): mod_base = OTHER; note = 2-Prime-O-Methyl modified nucleoside
  modified_base order(1^2,31^32): mod_base = OTHER; note = (1,3-dimethylimidazolidin-2-ylidene) Phosphoramidate linkage
  modified_base order(2..23,24..31): mod_base = OTHER; note = Phosphorothioate linkage
  modified_base 23^24: mod_base = OTHER; note = Methylphosphonate linkage
  misc_feature 1..32: note = RM115229

SEQ ID NO: 585 - DNA, 32 bp, synthetic construct; identical to SEQ ID NO: 76
  source 1..32: mol_type = other DNA
  misc_feature 19..20: note = DNA
  misc_feature order(1..18,21..32): note = RNA
  modified_base 18: mod_base = OTHER; note = 2-Prime-O-Methoxyethyl modified 5-methyl Uridine
  modified_base 19: mod_base = OTHER; note = DNA nucleotide carrying a 6-amino-5-nitro-3-yl-2(1H)-pyridone nucleobase
  modified_base order(17,22,24,27..29): mod_base = OTHER; note = 2-Prime-Fluoro modified nucleoside
  modified_base order(1..16,21,23,25..26,30..32): mod_base = OTHER; note = 2-Prime-O-Methyl modified nucleoside
  modified_base order(1^2,31^32): mod_base = OTHER; note = (1,3-dimethylimidazolidin-2-ylidene) Phosphoramidate linkage
  modified_base order(2..20,21..31): mod_base = OTHER; note = Phosphorothioate linkage
  modified_base 20^21: mod_base = OTHER; note = Methylphosphonate linkage
  misc_feature 1..32: note = RM115230

SEQ ID NO: 586 - DNA, 32 bp, synthetic construct; identical to SEQ ID NO: 77
  source 1..32: mol_type = other DNA
  misc_feature 16..17: note = DNA
  misc_feature order(1..15,18..32): note = RNA
  modified_base 15: mod_base = OTHER; note = 2-Prime-O-Methoxyethyl modified 5-methyl Uridine
  modified_base 16: mod_base = OTHER; note = DNA nucleotide carrying a 6-amino-5-nitro-3-yl-2(1H)-pyridone nucleobase
  modified_base order(14,19,21,24..26): mod_base = OTHER; note = 2-Prime-Fluoro modified nucleoside
  modified_base order(1..13,18,20,22..23,27..32): mod_base = OTHER; note = 2-Prime-O-Methyl modified nucleoside
  modified_base order(1^2,31^32): mod_base = OTHER; note = (1,3-dimethylimidazolidin-2-ylidene) Phosphoramidate linkage
  modified_base order(2..17,18..31): mod_base = OTHER; note = Phosphorothioate linkage
  modified_base 17^18: mod_base = OTHER; note = Methylphosphonate linkage
  misc_feature 1..32: note = RM115231

SEQ ID NO: 587 - DNA, 32 bp, synthetic construct; identical to SEQ ID NO: 78
  source 1..32: mol_type = other DNA
  misc_feature 13..14: note = DNA
  misc_feature order(1..12,15..32): note = RNA
  modified_base 12: mod_base = OTHER; note = 2-Prime-O-Methoxyethyl modified 5-methyl Uridine
  modified_base 13: mod_base = OTHER; note = DNA nucleotide carrying a 6-amino-5-nitro-3-yl-2(1H)-pyridone nucleobase
  modified_base order(11,16,18,21..23): mod_base = OTHER; note = 2-Prime-Fluoro modified nucleoside
  modified_base order(1..10,15,17,19..20,24..32): mod_base = OTHER; note = 2-Prime-O-Methyl modified nucleoside
  modified_base order(1^2,31^32): mod_base = OTHER; note = (1,3-dimethylimidazolidin-2-ylidene) Phosphoramidate linkage
  modified_base order(2..14,15..31): mod_base = OTHER; note = Phosphorothioate linkage
  modified_base 14^15: mod_base = OTHER; note = Methylphosphonate linkage
  misc_feature 1..32: note = RM115232

SEQ ID NO: 588 - DNA, 32 bp, synthetic construct; identical to SEQ ID NO: 79
  source 1..32: mol_type = other DNA
  misc_feature 10..11: note = DNA
  misc_feature order(1..9,12..32): note = RNA
  modified_base 9: mod_base = OTHER; note = 2-Prime-O-Methoxyethyl modified 5-methyl Uridine
  modified_base 10: mod_base = OTHER; note = DNA nucleotide carrying a 6-amino-5-nitro-3-yl-2(1H)-pyridone nucleobase
  modified_base order(8,13,15,18..20): mod_base = OTHER; note = 2-Prime-Fluoro modified nucleoside
  modified_base order(1..7,12,14,16..17,21..32): mod_base = OTHER; note = 2-Prime-O-Methyl modified nucleoside
  modified_base order(1^2,31^32): mod_base = OTHER; note = (1,3-dimethylimidazolidin-2-ylidene) Phosphoramidate linkage
  modified_base order(2..11,12..31): mod_base = OTHER; note = Phosphorothioate linkage
  modified_base 11^12: mod_base = OTHER; note = Methylphosphonate linkage
  misc_feature 1..32: note = RM115233

SEQ ID NO: 589 - DNA, 32 bp, synthetic construct; identical to SEQ ID NO: 80
  source 1..32: mol_type = other DNA
  misc_feature 7..8: note = DNA
  misc_feature order(1..6,9..32): note = RNA
  modified_base 6: mod_base = OTHER; note = 2-Prime-O-Methoxyethyl modified 5-methyl Uridine
  modified_base 7: mod_base = OTHER; note = DNA nucleotide carrying a 6-amino-5-nitro-3-yl-2(1H)-pyridone nucleobase
  modified_base order(5,10,12,15..17): mod_base = OTHER; note = 2-Prime-Fluoro modified nucleoside
  modified_base order(1..4,9,11,13..14,18..32): mod_base = OTHER; note = 2-Prime-O-Methyl modified nucleoside
  modified_base order(1^2,31^32): mod_base = OTHER; note = (1,3-dimethylimidazolidin-2-ylidene) Phosphoramidate linkage
  modified_base order(2..8,9..31): mod_base = OTHER; note = Phosphorothioate linkage
  modified_base 8^9: mod_base = OTHER; note = Methylphosphonate linkage
  misc_feature 1..32: note = RM115234

SEQ ID NO: 590 - DNA, 23 bp, synthetic construct
  source 1..23: mol_type = other DNA
  misc_feature 18..19: note = DNA
  misc_feature order(1..17,20..23): note = RNA
  modified_base 17: mod_base = OTHER; note = 2-Prime-O-Methoxyethyl modified 5-methyl Uridine
  modified_base 18: mod_base = OTHER; note = DNA nucleotide carrying a 6-amino-5-nitro-3-yl-2(1H)-pyridone nucleobase
  modified_base order(10..12,15,21..22): mod_base = OTHER; note = 2-Prime-Fluoro modified nucleoside
  modified_base order(1..9,13..14,16,20,23): mod_base = OTHER; note = 2-Prime-O-Methyl modified nucleoside
  modified_base order(1^2,22^23): mod_base = OTHER; note = (1,3-dimethylimidazolidin-2-ylidene) Phosphoramidate linkage
  modified_base order(2..19,20..22): mod_base = OTHER; note = Phosphorothioate linkage
  modified_base 19^20: mod_base = OTHER; note = Methylphosphonate linkage
  misc_feature 1..23: note = RM115235
aatttggcccttcgtctnatgga

SEQ ID NO: 591 - DNA, 23 bp, synthetic construct
  source 1..23: mol_type = other DNA
  misc_feature 15..16: note = DNA
  misc_feature order(1..14,17..23): note = RNA
  modified_base 14: mod_base = OTHER; note = 2-Prime-O-Methoxyethyl modified 5-methyl Uridine
  modified_base 15: mod_base = OTHER; note = DNA nucleotide carrying a 6-amino-5-nitro-3-yl-2(1H)-pyridone nucleobase
  modified_base order(7..9,12,18..19): mod_base = OTHER; note = 2-Prime-Fluoro modified nucleoside
  modified_base order(1..6,10..11,13,17,20..23): mod_base = OTHER; note = 2-Prime-O-Methyl modified nucleoside
  modified_base order(1^2,22^23): mod_base = OTHER; note = (1,3-dimethylimidazolidin-2-ylidene) Phosphoramidate linkage
  modified_base order(2..16,17..22): mod_base = OTHER; note = Phosphorothioate linkage
  modified_base 16^17: mod_base = OTHER; note = Methylphosphonate linkage
  misc_feature 1..23: note = RM115236
ttggcccttcgtctnatggacaa

SEQ ID NO: 592 - DNA, 23 bp, synthetic construct
  source 1..23: mol_type = other DNA
  misc_feature 12..13: note = DNA
  misc_feature order(1..11,14..23): note = RNA
  modified_base 11: mod_base = OTHER; note = 2-Prime-O-Methoxyethyl modified 5-methyl Uridine
  modified_base 12: mod_base = OTHER; note = DNA nucleotide carrying a 6-amino-5-nitro-3-yl-2(1H)-pyridone nucleobase
  modified_base order(4..6,9,15..16): mod_base = OTHER; note = 2-Prime-Fluoro modified nucleoside
  modified_base order(1..3,7..8,10,14,17..23): mod_base = OTHER; note = 2-Prime-O-Methyl modified nucleoside
  modified_base order(1^2,22^23): mod_base = OTHER; note = (1,3-dimethylimidazolidin-2-ylidene) Phosphoramidate linkage
  modified_base order(2..13,14..22): mod_base = OTHER; note = Phosphorothioate linkage
  modified_base 13^14: mod_base = OTHER; note = Methylphosphonate linkage
  misc_feature 1..23: note = RM115237
gcccttcgtctnatggacaaagt

SEQ ID NO: 593 - DNA, 23 bp, synthetic construct
  source 1..23: mol_type = other DNA
  misc_feature 9..10: note = DNA
  misc_feature order(1..8,11..23): note = RNA
  modified_base 8: mod_base = OTHER; note = 2-Prime-O-Methoxyethyl modified 5-methyl Uridine
  modified_base 9: mod_base = OTHER; note = DNA nucleotide carrying a 6-amino-5-nitro-3-yl-2(1H)-pyridone nucleobase
  modified_base order(1..3,6,12..13): mod_base = OTHER; note = 2-Prime-Fluoro modified nucleoside
  modified_base order(4..5,7,11,14..23): mod_base = OTHER; note = 2-Prime-O-Methyl modified nucleoside
  modified_base order(1^2,22^23): mod_base = OTHER; note = (1,3-dimethylimidazolidin-2-ylidene) Phosphoramidate linkage
  modified_base order(2..10,11..22): mod_base = OTHER; note = Phosphorothioate linkage
  modified_base 10^11: mod_base = OTHER; note = Methylphosphonate linkage
  misc_feature 1..23: note = RM115238
cttcgtctnatggacaaagtctt

SEQ ID NO: 594 - DNA, 32 bp, synthetic construct; identical to SEQ ID NO: 73
  source 1..32: mol_type = other DNA
  misc_feature 28..29: note = DNA
  misc_feature order(1..27,30..32): note = RNA
  modified_base 27: mod_base = OTHER; note = 2-Prime-O-Methoxyethyl modified 5-methyl Uridine
  modified_base 28: mod_base = OTHER; note = DNA nucleotide carrying a 6-amino-5-nitro-3-yl-2(1H)-pyridone nucleobase
  modified_base order(20..22,25,31..32): mod_base = OTHER; note = 2-Prime-Fluoro modified nucleoside
  modified_base order(1..19,23..24,26,30): mod_base = OTHER; note = 2-Prime-O-Methyl modified nucleoside
  modified_base order(1^2,31^32): mod_base = OTHER; note = (1,3-dimethylimidazolidin-2-ylidene) Phosphoramidate linkage
  modified_base order(2..29,30^31): mod_base = OTHER; note = Phosphorothioate linkage
  modified_base 29^30: mod_base = OTHER; note = Methylphosphonate linkage
  misc_feature 1..32: note = RM115239

SEQ ID NO: 595 - DNA, 32 bp, synthetic construct; identical to SEQ ID NO: 74
  source 1..32: mol_type = other DNA
  misc_feature 25..26: note = DNA
  misc_feature order(1..24,27..32): note = RNA
  modified_base 24: mod_base = OTHER; note = 2-Prime-O-Methoxyethyl modified 5-methyl Uridine
  modified_base 25: mod_base = OTHER; note = DNA nucleotide carrying a 6-amino-5-nitro-3-yl-2(1H)-pyridone nucleobase
  modified_base order(17..19,22,28..29): mod_base = OTHER; note = 2-Prime-Fluoro modified nucleoside
  modified_base order(1..16,20..21,23,27,30..32): mod_base = OTHER; note = 2-Prime-O-Methyl modified nucleoside
  modified_base order(1^2,31^32): mod_base = OTHER; note = (1,3-dimethylimidazolidin-2-ylidene) Phosphoramidate linkage
  modified_base order(2..26,27..31): mod_base = OTHER; note = Phosphorothioate linkage
  modified_base 26^27: mod_base = OTHER; note = Methylphosphonate linkage
  misc_feature 1..32: note = RM115240

SEQ ID NO: 596 - DNA, 32 bp, synthetic construct; identical to SEQ ID NO: 75
  source 1..32: mol_type = other DNA
  misc_feature 22..23: note = DNA
  misc_feature order(1..21,24..32): note = RNA
  modified_base 21: mod_base = OTHER; note = 2-Prime-O-Methoxyethyl modified 5-methyl Uridine
  modified_base 22: mod_base = OTHER; note = DNA nucleotide carrying a 6-amino-5-nitro-3-yl-2(1H)-pyridone nucleobase
  modified_base order(14..16,19,25..26): mod_base = OTHER; note = 2-Prime-Fluoro modified nucleoside
  modified_base order(1..13,17..18,20,24,27..32): mod_base = OTHER; note = 2-Prime-O-Methyl modified nucleoside
  modified_base order(1^2,31^32): mod_base = OTHER; note = (1,3-dimethylimidazolidin-2-ylidene) Phosphoramidate linkage
  modified_base order(2..23,24..31): mod_base = OTHER; note = Phosphorothioate linkage
  modified_base 23^24: mod_base = OTHER; note = Methylphosphonate linkage
  misc_feature 1..32: note = RM115241

SEQ ID NO: 597 - DNA, 32 bp, synthetic construct; identical to SEQ ID NO: 76
  source 1..32: mol_type = other DNA
  misc_feature 19..20: note = DNA
  misc_feature order(1..18,21..32): note = RNA
  modified_base 18: mod_base = OTHER; note = 2-Prime-O-Methoxyethyl modified 5-methyl Uridine
  modified_base 19: mod_base = OTHER; note = DNA nucleotide carrying a 6-amino-5-nitro-3-yl-2(1H)-pyridone nucleobase
  modified_base order(11..13,16,22..23): mod_base = OTHER; note = 2-Prime-Fluoro modified nucleoside
  modified_base order(1..10,14..15,17,21,24..32): mod_base = OTHER; note = 2-Prime-O-Methyl modified nucleoside
  modified_base order(1^2,31^32): mod_base = OTHER; note = (1,3-dimethylimidazolidin-2-ylidene) Phosphoramidate linkage
  modified_base order(2..20,21..31): mod_base = OTHER; note = Phosphorothioate linkage
  modified_base 20^21: mod_base = OTHER; note = Methylphosphonate linkage
  misc_feature 1..32: note = RM115242

SEQ ID NO: 598 - DNA, 32 bp, synthetic construct; identical to SEQ ID NO: 77
  source 1..32: mol_type = other DNA
  misc_feature 16..17: note = DNA
  misc_feature order(1..15,18..32): note = RNA
  modified_base 15: mod_base = OTHER; note = 2-Prime-O-Methoxyethyl modified 5-methyl Uridine
  modified_base 16: mod_base = OTHER; note = DNA nucleotide carrying a 6-amino-5-nitro-3-yl-2(1H)-pyridone nucleobase
  modified_base order(8..10,13,19..20): mod_base = OTHER; note = 2-Prime-Fluoro modified nucleoside
  modified_base order(1..7,11..12,14,18,21..32): mod_base = OTHER; note = 2-Prime-O-Methyl modified nucleoside
  modified_base order(1^2,31^32): mod_base = OTHER; note = (1,3-dimethylimidazolidin-2-ylidene) Phosphoramidate linkage
  modified_base order(2..17,18..31): mod_base = OTHER; note = Phosphorothioate linkage
  modified_base 17^18: mod_base = OTHER; note = Methylphosphonate linkage
  misc_feature 1..32: note = RM115243

SEQ ID NO: 599 - DNA, 32 bp, synthetic construct; identical to SEQ ID NO: 78
  source 1..32: mol_type = other DNA
  misc_feature 13..14: note = DNA
  misc_feature order(1..12,15..32): note = RNA
  modified_base 12: mod_base = OTHER; note = 2-Prime-O-Methoxyethyl modified 5-methyl Uridine
  modified_base 13: mod_base = OTHER; note = DNA nucleotide carrying a 6-amino-5-nitro-3-yl-2(1H)-pyridone nucleobase
  modified_base order(5..7,10,16..17): mod_base = OTHER; note = 2-Prime-Fluoro modified nucleoside
  modified_base order(1..4,8..9,11,15,18..32): mod_base = OTHER; note = 2-Prime-O-Methyl modified nucleoside
  modified_base order(1^2,31^32): mod_base = OTHER; note = (1,3-dimethylimidazolidin-2-ylidene) Phosphoramidate linkage
  modified_base order(2..14,15..31): mod_base = OTHER; note = Phosphorothioate linkage
  modified_base 14^15: mod_base = OTHER; note = Methylphosphonate linkage
  misc_feature 1..32: note = RM115244

SEQ ID NO: 600 - DNA, 32 bp, synthetic construct; identical to SEQ ID NO: 79
  source 1..32: mol_type = other DNA
  misc_feature 10..11: note = DNA
  misc_feature order(1..9,12..32): note = RNA
  modified_base 9: mod_base = OTHER; note = 2-Prime-O-Methoxyethyl modified 5-methyl Uridine
  modified_base 10: mod_base = OTHER; note = DNA nucleotide carrying a 6-amino-5-nitro-3-yl-2(1H)-pyridone nucleobase
  modified_base order(2..4,7,13..14): mod_base = OTHER; note = 2-Prime-Fluoro modified nucleoside
  modified_base order(1,5..6,8,12,15..32): mod_base = OTHER; note = 2-Prime-O-Methyl modified nucleoside
  modified_base order(1^2,31^32): mod_base = OTHER; note = (1,3-dimethylimidazolidin-2-ylidene) Phosphoramidate linkage
  modified_base order(2..11,12..31): mod_base = OTHER; note = Phosphorothioate linkage
  modified_base 11^12: mod_base = OTHER; note = Methylphosphonate linkage
  misc_feature 1..32: note = RM115245

SEQ ID NO: 601 - DNA, 26 bp, synthetic construct
  source 1..26: mol_type = other DNA
  misc_feature 22..23: note = DNA
  misc_feature order(1..21,24..26): note = RNA
  modified_base 21: mod_base = OTHER; note = 2-Prime-O-Methoxyethyl modified 5-methyl Uridine
  modified_base 22: mod_base = OTHER; note = DNA nucleotide carrying a 6-amino-5-nitro-3-yl-2(1H)-pyridone nucleobase
  modified_base order(1,4,11,14,17,25..26): mod_base = OTHER; note = 2-Prime-Fluoro modified nucleoside
  modified_base order(2..3,5..10,12..13,15..16,18..20,24): mod_base = OTHER; note = 2-Prime-O-Methyl modified nucleoside
  modified_base order(1^2,25^26): mod_base = OTHER; note = (1,3-dimethylimidazolidin-2-ylidene) Phosphoramidate linkage
  modified_base order(2..23,24^25): mod_base = OTHER; note = Phosphorothioate linkage
  modified_base 23^24: mod_base = OTHER; note = Methylphosphonate linkage
  misc_feature 1..26: note = RM115246
cattaatttggcccttcgtctnatgg

SEQ ID NO: 602 - DNA, 26 bp, synthetic construct
  source 1..26: mol_type = other DNA
  misc_feature 22..23: note = DNA
  misc_feature order(1..21,24..26): note = RNA
  modified_base 21: mod_base = OTHER; note = 2-Prime-O-Methoxyethyl modified 5-methyl Uridine
  modified_base 22: mod_base = OTHER; note = DNA nucleotide carrying a 6-amino-5-nitro-3-yl-2(1H)-pyridone nucleobase
  modified_base order(4,11,14,17,25): mod_base = OTHER; note = 2-Prime-Fluoro modified nucleoside
  modified_base order(1..3,5..10,12..13,15..16,18..20,24,26): mod_base = OTHER; note = 2-Prime-O-Methyl modified nucleoside
  modified_base order(1^2,25^26): mod_base = OTHER; note = (1,3-dimethylimidazolidin-2-ylidene) Phosphoramidate linkage
  modified_base order(2..23,24^25): mod_base = OTHER; note = Phosphorothioate linkage
  modified_base 23^24: mod_base = OTHER; note = Methylphosphonate linkage
  misc_feature 1..26: note = RM115247
cattaatttggcccttcgtctnatgg

SEQ ID NO: 603 - DNA, 26 bp, synthetic construct
  source 1..26: mol_type = other DNA
  misc_feature 19..20: note = DNA
  misc_feature order(1..18,21..26): note = RNA
  modified_base 18: mod_base = OTHER; note = 2-Prime-O-Methoxyethyl modified 5-methyl Uridine
  modified_base 19: mod_base = OTHER; note = DNA nucleotide carrying a 6-amino-5-nitro-3-yl-2(1H)-pyridone nucleobase
  modified_base order(1,8,11,14,22): mod_base = OTHER; note = 2-Prime-Fluoro modified nucleoside
  modified_base order(2..7,9..10,12..13,15..17,21,23..26): mod_base = OTHER; note = 2-Prime-O-Methyl modified nucleoside
  modified_base order(1^2,25^26): mod_base = OTHER; note = (1,3-dimethylimidazolidin-2-ylidene) Phosphoramidate linkage
  modified_base order(2..20,21..25): mod_base = OTHER; note = Phosphorothioate linkage
  modified_base 20^21: mod_base = OTHER; note = Methylphosphonate linkage
  misc_feature 1..26: note = RM115248
taatttggcccttcgtctnatggaca

SEQ ID NO: 604 - DNA, 29 bp, synthetic construct
  source 1..29: mol_type = other DNA
  misc_feature 24..25: note = DNA
  misc_feature order(1..23,26..29): note = RNA
  modified_base 23: mod_base = OTHER; note = 2-Prime-O-Methoxyethyl modified 5-methyl Uridine
  modified_base 24: mod_base = OTHER; note = DNA nucleotide carrying a 6-amino-5-nitro-3-yl-2(1H)-pyridone nucleobase
  modified_base order(6,13,16,19,27): mod_base = OTHER; note = 2-Prime-Fluoro modified nucleoside
  modified_base order(1..5,7..12,14..15,17..18,20..22,26,28..29): mod_base = OTHER; note = 2-Prime-O-Methyl modified nucleoside
  modified_base order(1^2,28^29): mod_base = OTHER; note = (1,3-dimethylimidazolidin-2-ylidene) Phosphoramidate linkage
  modified_base order(2..25,26..28): mod_base = OTHER; note = Phosphorothioate linkage
  modified_base 25^26: mod_base = OTHER; note = Methylphosphonate linkage
  misc_feature 1..29: note = RM115249
gtcattaatttggcccttcgtctnatgga

SEQ ID NO: 605 - DNA, 29 bp, synthetic construct
  source 1..29: mol_type = other DNA
  misc_feature 21..22: note = DNA
  misc_feature order(1..20,23..29): note = RNA
  modified_base 20: mod_base = OTHER; note = 2-Prime-O-Methoxyethyl modified 5-methyl Uridine
  modified_base 21: mod_base = OTHER; note = DNA nucleotide carrying a 6-amino-5-nitro-3-yl-2(1H)-pyridone nucleobase
  modified_base order(3,10,13,16,24): mod_base = OTHER; note = 2-Prime-Fluoro modified nucleoside
  modified_base order(1..2,4..9,11..12,14..15,17..19,23,25..29): mod_base = OTHER; note = 2-Prime-O-Methyl modified nucleoside
  modified_base order(1^2,28^29): mod_base = OTHER; note = (1,3-dimethylimidazolidin-2-ylidene) Phosphoramidate linkage
  modified_base order(2..22,23..28): mod_base = OTHER; note = Phosphorothioate linkage
  modified_base 22^23: mod_base = OTHER; note = Methylphosphonate linkage
  misc_feature 1..29: note = RM115250
attaatttggcccttcgtctnatggacaa

SEQ ID NO: 606 - DNA, 23 bp, synthetic construct
  source 1..23: mol_type = other DNA
  misc_feature 18..19: note = DNA
  misc_feature order(1..17,20..23): note = RNA
  modified_base 17: mod_base = OTHER; note = 2-Prime-O-Methoxyethyl modified 5-methyl Uridine
  modified_base 18: mod_base = OTHER; note = DNA nucleotide carrying a 6-amino-5-nitro-3-yl-2(1H)-pyridone nucleobase
  modified_base order(13,21): mod_base = OTHER; note = 2-Prime-Fluoro modified nucleoside
  modified_base order(1..12,14..16,20,22..23): mod_base = OTHER; note = 2-Prime-O-Methyl modified nucleoside
  modified_base order(1^2,22^23): mod_base = OTHER; note = (1,3-dimethylimidazolidin-2-ylidene) Phosphoramidate linkage
  modified_base order(2..19,20..22): mod_base = OTHER; note = Phosphorothioate linkage
  modified_base 19^20: mod_base = OTHER; note = Methylphosphonate linkage
  misc_feature 1..23: note = RM115251
aatttggcccttcgtctnatgga

SEQ ID NO: 607 - DNA, 23 bp, synthetic construct
  source 1..23: mol_type = other DNA
  misc_feature 15..16: note = DNA
  misc_feature order(1..14,17..23): note = RNA
  modified_base 14: mod_base = OTHER; note = 2-Prime-O-Methoxyethyl modified 5-methyl Uridine
  modified_base 15: mod_base = OTHER; note = DNA nucleotide carrying a 6-amino-5-nitro-3-yl-2(1H)-pyridone nucleobase
  modified_base order(10,18): mod_base = OTHER; note = 2-Prime-Fluoro modified nucleoside
  modified_base order(1..9,11..13,17,19..23): mod_base = OTHER; note = 2-Prime-O-Methyl modified nucleoside
  modified_base order(1^2,22^23): mod_base = OTHER; note = (1,3-dimethylimidazolidin-2-ylidene) Phosphoramidate linkage
  modified_base order(2..16,17..22): mod_base = OTHER; note = Phosphorothioate linkage
  modified_base 16^17: mod_base = OTHER; note = Methylphosphonate linkage
  misc_feature 1..23: note = RM115252
ttggcccttcgtctnatggacaa

SEQ ID NO: 608 - DNA, 23 bp, synthetic construct
  source 1..23: mol_type = other DNA
  misc_feature 12..13: note = DNA
  misc_feature order(1..11,14..23): note = RNA
  modified_base 11: mod_base = OTHER; note = 2-Prime-O-Methoxyethyl modified 5-methyl Uridine
  modified_base 12: mod_base = OTHER; note = DNA nucleotide carrying a 6-amino-5-nitro-3-yl-2(1H)-pyridone nucleobase
  modified_base order(7,15): mod_base = OTHER; note = 2-Prime-Fluoro modified nucleoside
  modified_base order(1..6,8..10,14,16..23): mod_base = OTHER; note = 2-Prime-O-Methyl modified nucleoside
  modified_base order(1^2,22^23): mod_base = OTHER; note = (1,3-dimethylimidazolidin-2-ylidene) Phosphoramidate linkage
  modified_base order(2..13,14..22): mod_base = OTHER; note = Phosphorothioate linkage
  modified_base 13^14: mod_base = OTHER; note = Methylphosphonate linkage
  misc_feature 1..23: note = RM115253
gcccttcgtctnatggacaaagt

SEQ ID NO: 609 - DNA, 23 bp, synthetic construct
  source 1..23: mol_type = other DNA
  misc_feature 9..10: note = DNA
  misc_feature order(1..8,11..23): note = RNA
  modified_base 8: mod_base = OTHER; note = 2-Prime-O-Methoxyethyl modified 5-methyl Uridine
  modified_base 9: mod_base = OTHER; note = DNA nucleotide carrying a 6-amino-5-nitro-3-yl-2(1H)-pyridone nucleobase
  modified_base order(4,12): mod_base = OTHER; note = 2-Prime-Fluoro modified nucleoside
  modified_base order(1..3,5..7,11,13..23): mod_base = OTHER; note = 2-Prime-O-Methyl modified nucleoside
  modified_base order(1^2,22^23): mod_base = OTHER; note = (1,3-dimethylimidazolidin-2-ylidene) Phosphoramidate linkage
  modified_base order(2..10,11..22): mod_base = OTHER; note = Phosphorothioate linkage
  modified_base 10^11: mod_base = OTHER; note = Methylphosphonate linkage
  misc_feature 1..23: note = RM115254
cttcgtctnatggacaaagtctt

SEQ ID NO: 610 - DNA, 23 bp, synthetic construct
  source 1..23: mol_type = other DNA
  misc_feature 6..7: note = DNA
  misc_feature order(1..5,8..23): note = RNA
  modified_base 5: mod_base = OTHER; note = 2-Prime-O-Methoxyethyl modified 5-methyl Uridine
  modified_base 6: mod_base = OTHER; note = DNA nucleotide carrying a 6-amino-5-nitro-3-yl-2(1H)-pyridone nucleobase
  modified_base order(1,9): mod_base = OTHER; note = 2-Prime-Fluoro modified nucleoside
  modified_base order(2..4,8,10..23): mod_base = OTHER; note = 2-Prime-O-Methyl modified nucleoside
  modified_base order(1^2,22^23): mod_base = OTHER; note = (1,3-dimethylimidazolidin-2-ylidene) Phosphoramidate linkage
  modified_base order(2..7,8..22): mod_base = OTHER; note = Phosphorothioate linkage
  modified_base 7^8: mod_base = OTHER; note = Methylphosphonate linkage
  misc_feature 1..23: note = RM115255
cgtctnatggacaaagtctttaa

SEQ ID NO: 611 - DNA, 26 bp, synthetic construct
  source 1..26: mol_type = other DNA
  misc_feature 22..23: note = DNA
  misc_feature order(1..21,24..26): note = RNA
  modified_base 21: mod_base = OTHER; note = 2-Prime-O-Methoxyethyl modified 5-methyl Uridine
  modified_base 22: mod_base = OTHER; note = DNA nucleotide carrying a 6-amino-5-nitro-3-yl-2(1H)-pyridone nucleobase
  modified_base order(17,25): mod_base = OTHER; note = 2-Prime-Fluoro modified nucleoside
  modified_base order(1..16,18..20,24,26): mod_base = OTHER; note = 2-Prime-O-Methyl modified nucleoside
  modified_base order(1^2,25^26): mod_base = OTHER; note = (1,3-dimethylimidazolidin-2-ylidene) Phosphoramidate linkage
  modified_base order(2..23,24^25): mod_base = OTHER; note = Phosphorothioate linkage
  modified_base 23^24: mod_base = OTHER; note = Methylphosphonate linkage
  misc_feature 1..26: note = RM115256
cattaatttggcccttcgtctnatgg

SEQ ID NO: 612 - DNA, 26 bp, synthetic construct
  source 1..26: mol_type = other DNA
  misc_feature 19..20: note = DNA
  misc_feature order(1..18,21..26): note = RNA
  modified_base 18: mod_base = OTHER; note = 2-Prime-O-Methoxyethyl modified 5-methyl Uridine
  modified_base 19: mod_base = OTHER; note = DNA nucleotide carrying a 6-amino-5-nitro-3-yl-2(1H)-pyridone nucleobase
  modified_base order(14,22): mod_base = OTHER; note = 2-Prime-Fluoro modified nucleoside
  modified_base order(1..13,15..17,21,23..26): mod_base = OTHER; note = 2-Prime-O-Methyl modified nucleoside
  modified_base order(1^2,25^26): mod_base = OTHER; note = (1,3-dimethylimidazolidin-2-ylidene) Phosphoramidate linkage
  modified_base order(2..20,21..25): mod_base = OTHER; note = Phosphorothioate linkage
  modified_base 20^21: mod_base = OTHER; note = Methylphosphonate linkage
  misc_feature 1..26: note = RM115257
taatttggcccttcgtctnatggaca

SEQ ID NO: 613 - DNA, 26 bp, synthetic construct
  source 1..26: mol_type = other DNA
  misc_feature 16..17: note = DNA
  misc_feature order(1..15,18..26): note = RNA
  modified_base 15: mod_base = OTHER; note = 2-Prime-O-Methoxyethyl modified 5-methyl Uridine
  modified_base 16: mod_base = OTHER; note = DNA nucleotide carrying a 6-amino-5-nitro-3-yl-2(1H)-pyridone nucleobase
  modified_base order(11,19): mod_base = OTHER; note = 2-Prime-Fluoro modified nucleoside
  modified_base order(1..10,12..14,18,20..26): mod_base = OTHER; note = 2-Prime-O-Methyl modified nucleoside
  modified_base order(1^2,25^26): mod_base = OTHER; note = (1,3-dimethylimidazolidin-2-ylidene) Phosphoramidate linkage
  modified_base order(2..17,18..25): mod_base = OTHER; note = Phosphorothioate linkage
  modified_base 17^18: mod_base = OTHER; note = Methylphosphonate linkage
  misc_feature 1..26: note = RM115258
tttggcccttcgtctnatggacaaag

SEQ ID NO: 614 - DNA, 26 bp, synthetic construct
  source 1..26: mol_type = other DNA
  misc_feature 13..14: note = DNA
  misc_feature order(1..12,15..26): note = RNA
  modified_base 12: mod_base = OTHER; note = 2-Prime-O-Methoxyethyl modified 5-methyl Uridine
  modified_base 13: mod_base = OTHER; note = DNA nucleotide carrying a 6-amino-5-nitro-3-yl-2(1H)-pyridone nucleobase
  modified_base order(8,16): mod_base = OTHER; note = 2-Prime-Fluoro modified nucleoside
  modified_base order(1..7,9..11,15,17..26): mod_base = OTHER; note = 2-Prime-O-Methyl modified nucleoside
  modified_base order(1^2,25^26): mod_base = OTHER; note = (1,3-dimethylimidazolidin-2-ylidene) Phosphoramidate linkage
  modified_base order(2..14,15..25): mod_base = OTHER; note = Phosphorothioate linkage
  modified_base 14^15: mod_base = OTHER; note = Methylphosphonate linkage
  misc_feature 1..26: note = RM115259
ggcccttcgtctnatggacaaagtct

SEQ ID NO: 615 - DNA, 26 bp, synthetic construct
  source 1..26: mol_type = other DNA
  misc_feature 10..11: note = DNA
  misc_feature order(1..9,12..26): note = RNA
  modified_base 9: mod_base = OTHER; note = 2-Prime-O-Methoxyethyl modified 5-methyl Uridine
  modified_base 10: mod_base = OTHER; note = DNA nucleotide carrying a 6-amino-5-nitro-3-yl-2(1H)-pyridone nucleobase
  modified_base order(5,13): mod_base = OTHER; note = 2-Prime-Fluoro modified nucleoside
  modified_base order(1..4,6..8,12,14..26): mod_base = OTHER; note = 2-Prime-O-Methyl modified nucleoside
  modified_base order(1^2,25^26): mod_base = OTHER; note = (1,3-dimethylimidazolidin-2-ylidene) Phosphoramidate linkage
  modified_base order(2..11,12..25): mod_base = OTHER; note = Phosphorothioate linkage
  modified_base 11^12: mod_base = OTHER; note = Methylphosphonate linkage
  misc_feature 1..26: note = RM115260
ccttcgtctnatggacaaagtcttta

SEQ ID NO: 616 - DNA, 26 bp, synthetic construct
  source 1..26: mol_type = other DNA
  misc_feature 7..8: note = DNA
  misc_feature order(1..6,9..26): note = RNA
  modified_base 6: mod_base = OTHER; note = 2-Prime-O-Methoxyethyl modified 5-methyl Uridine
  modified_base 7: mod_base = OTHER; note = DNA nucleotide carrying a 6-amino-5-nitro-3-yl-2(1H)-pyridone nucleobase
  modified_base order(2,10): mod_base = OTHER; note = 2-Prime-Fluoro modified nucleoside
  modified_base order(1,3..5,9,11..26): mod_base = OTHER; note = 2-Prime-O-Methyl modified nucleoside
  modified_base order(1^2,25^26): mod_base = OTHER; note = (1,3-dimethylimidazolidin-2-ylidene) Phosphoramidate linkage
  modified_base order(2..8,9..25): mod_base = OTHER; note = Phosphorothioate linkage
  modified_base 8^9: mod_base = OTHER; note = Methylphosphonate linkage
  misc_feature 1..26: note = RM115261
tcgtctnatggacaaagtctttaaga

SEQ ID NO: 617 - DNA, 29 bp, synthetic construct
  source 1..29: mol_type = other DNA
  misc_feature 24..25: note = DNA
  misc_feature order(1..23,26..29): note = RNA
  modified_base 23: mod_base = OTHER; note = 2-Prime-O-Methoxyethyl modified 5-methyl Uridine
  modified_base 24: mod_base = OTHER; note = DNA nucleotide carrying a 6-amino-5-nitro-3-yl-2(1H)-pyridone nucleobase
  modified_base order(19,27): mod_base = OTHER; note = 2-Prime-Fluoro modified nucleoside
  modified_base order(1..18,20..22,26,28..29): mod_base = OTHER; note = 2-Prime-O-Methyl modified nucleoside
  modified_base order(1^2,28^29): mod_base = OTHER; note = (1,3-dimethylimidazolidin-2-ylidene) Phosphoramidate linkage
  modified_base order(2..25,26..28): mod_base = OTHER; note = Phosphorothioate linkage
  modified_base 25^26: mod_base = OTHER; note = Methylphosphonate linkage
  misc_feature 1..29: note = RM115262
gtcattaatttggcccttcgtctnatgga

SEQ ID NO: 618 - DNA, 29 bp, synthetic construct
  source 1..29: mol_type = other DNA
  misc_feature 21..22: note = DNA
  misc_feature order(1..20,23..29): note = RNA
  modified_base 20: mod_base = OTHER; note = 2-Prime-O-Methoxyethyl modified 5-methyl Uridine
  modified_base 21: mod_base = OTHER; note = DNA nucleotide carrying a 6-amino-5-nitro-3-yl-2(1H)-pyridone nucleobase
  modified_base order(16,24): mod_base = OTHER; note = 2-Prime-Fluoro modified nucleoside
  modified_base order(1..15,17..19,23,25..29): mod_base = OTHER; note = 2-Prime-O-Methyl modified nucleoside
  modified_base order(1^2,28^29): mod_base = OTHER; note = (1,3-dimethylimidazolidin-2-ylidene) Phosphoramidate linkage
  modified_base order(2..22,23..28): mod_base = OTHER; note = Phosphorothioate linkage
  modified_base 22^23: mod_base = OTHER; note = Methylphosphonate linkage
  misc_feature 1..29: note = RM115263
attaatttggcccttcgtctnatggacaa

SEQ ID NO: 619 - DNA, 29 bp, synthetic construct
  source 1..29: mol_type = other DNA
  misc_feature 18..19: note = DNA
  misc_feature order(1..17,20..29): note = RNA
  modified_base 17: mod_base = OTHER; note = 2-Prime-O-Methoxyethyl modified 5-methyl Uridine
  modified_base 18: mod_base = OTHER; note = DNA nucleotide carrying a 6-amino-5-nitro-3-yl-2(1H)-pyridone nucleobase
  modified_base order(13,21): mod_base = OTHER; note = 2-Prime-Fluoro modified nucleoside
  modified_base order(1..12,14..16,20,22..29): mod_base = OTHER; note = 2-Prime-O-Methyl modified nucleoside
  modified_base order(1^2,28^29): mod_base = OTHER; note = (1,3-dimethylimidazolidin-2-ylidene) Phosphoramidate linkage
  modified_base order(2..19,20..28): mod_base = OTHER; note = Phosphorothioate linkage
  modified_base 19^20: mod_base = OTHER; note = Methylphosphonate linkage
  misc_feature 1..29: note = RM115264
aatttggcccttcgtctnatggacaaagt

SEQ ID NO: 620 - DNA, 29 bp, synthetic construct
  source 1..29: mol_type = other DNA
  misc_feature 15..16: note = DNA
  misc_feature order(1..14,17..29): note = RNA
  modified_base 14: mod_base = OTHER; note = 2-Prime-O-Methoxyethyl modified 5-methyl Uridine
  modified_base 15: mod_base = OTHER; note = DNA nucleotide carrying a 6-amino-5-nitro-3-yl-2(1H)-pyridone nucleobase
  modified_base order(10,18): mod_base = OTHER; note = 2-Prime-Fluoro modified nucleoside
  modified_base order(1..9,11..13,17,19..29): mod_base = OTHER; note = 2-Prime-O-Methyl modified nucleoside
  modified_base order(1^2,28^29): mod_base = OTHER; note = (1,3-dimethylimidazolidin-2-ylidene) Phosphoramidate linkage
  modified_base order(2..16,17..28): mod_base = OTHER; note = Phosphorothioate linkage
  modified_base 16^17: mod_base = OTHER; note = Methylphosphonate linkage
  misc_feature 1..29: note = RM115265
ttggcccttcgtctnatggacaaagtctt

SEQ ID NO: 621 - DNA, 29 bp, synthetic construct
  source 1..29: mol_type = other DNA
  misc_feature 12..13: note = DNA
  misc_feature order(1..11,14..29): note = RNA
  modified_base 11: mod_base = OTHER; note = 2-Prime-O-Methoxyethyl modified 5-methyl Uridine
  modified_base 12: mod_base = OTHER; note = DNA nucleotide carrying a 6-amino-5-nitro-3-yl-2(1H)-pyridone nucleobase
  modified_base order(7,15): mod_base = OTHER; note = 2-Prime-Fluoro modified nucleoside
  modified_base order(1..6,8..10,14,16..29): mod_base = OTHER; note = 2-Prime-O-Methyl modified nucleoside
  modified_base order(1^2,28^29): mod_base = OTHER; note = (1,3-dimethylimidazolidin-2-ylidene) Phosphoramidate linkage
  modified_base order(2..13,14..28): mod_base = OTHER; note = Phosphorothioate linkage
  modified_base 13^14: mod_base = OTHER; note = Methylphosphonate linkage
  misc_feature 1..29: note = RM115266
gcccttcgtctnatggacaaagtctttaa

SEQ ID NO: 622 - DNA, 29 bp, synthetic construct
  source 1..29: mol_type = other DNA
  misc_feature 9..10: note = DNA
  misc_feature order(1..8,11..29): note = RNA
  modified_base 8: mod_base = OTHER; note = 2-Prime-O-Methoxyethyl modified 5-methyl Uridine
  modified_base 9: mod_base = OTHER; note = DNA nucleotide carrying a 6-amino-5-nitro-3-yl-2(1H)-pyridone nucleobase
  modified_base order(4,12): mod_base = OTHER; note = 2-Prime-Fluoro modified nucleoside
  modified_base order(1..3,5..7,11,13..29): mod_base = OTHER; note = 2-Prime-O-Methyl modified nucleoside
  modified_base order(1^2,28^29): mod_base = OTHER; note = (1,3-dimethylimidazolidin-2-ylidene) Phosphoramidate linkage
  modified_base order(2..10,11..28): mod_base = OTHER; note = Phosphorothioate linkage
  modified_base 10^11: mod_base = OTHER; note = Methylphosphonate linkage
  misc_feature 1..29: note = RM115267
cttcgtctnatggacaaagtctttaagac

SEQ ID NO: 623 - DNA, 29 bp, synthetic construct
  source 1..29: mol_type = other DNA
  misc_feature 6..7: note = DNA
  misc_feature order(1..5,8..29): note = RNA
  modified_base 5: mod_base = OTHER; note = 2-Prime-O-Methoxyethyl modified 5-methyl Uridine
  modified_base 6: mod_base = OTHER; note = DNA nucleotide carrying a 6-amino-5-nitro-3-yl-2(1H)-pyridone nucleobase
  modified_base order(1,9): mod_base = OTHER; note = 2-Prime-Fluoro modified nucleoside
  modified_base order(2..4,8,10..29): mod_base = OTHER; note = 2-Prime-O-Methyl modified nucleoside
  modified_base order(1^2,28^29): mod_base = OTHER; note = (1,3-dimethylimidazolidin-2-ylidene) Phosphoramidate linkage
  modified_base order(2..7,8..28): mod_base = OTHER; note = Phosphorothioate linkage
  modified_base 7^8: mod_base = OTHER; note = Methylphosphonate linkage
  misc_feature 1..29: note = RM115268
cgtctnatggacaaagtctttaagaccat

SEQ ID NO: 624 - DNA, 32 bp, synthetic construct; identical to SEQ ID NO: 76
  source 1..32: mol_type = other DNA
  misc_feature 19..20: note = DNA
  misc_feature order(1..18,21..32): note = RNA
  modified_base 18: mod_base = OTHER; note = 2-Prime-O-Methoxyethyl modified 5-methyl Uridine
  modified_base 19: mod_base = OTHER; note = DNA nucleotide carrying a 6-amino-5-nitro-3-yl-2(1H)-pyridone nucleobase
  modified_base order(2,5,8,10,17,22,25,27,32): mod_base = OTHER; note = 2-Prime-Fluoro modified nucleoside
  modified_base order(1,3..4,6..7,9,11..16,21,23..24,26,28..31): mod_base = OTHER; note = 2-Prime-O-Methyl modified nucleoside
  modified_base order(1^2,31^32): mod_base = OTHER; note = (1,3-dimethylimidazolidin-2-ylidene) Phosphoramidate linkage
  modified_base order(2..20,21..31): mod_base = OTHER; note = Phosphorothioate linkage
  modified_base 20^21: mod_base = OTHER; note = Methylphosphonate linkage
  misc_feature 1..32: note = RM115269

SEQ ID NO: 625 - DNA, 32 bp, synthetic construct; identical to SEQ ID NO: 78
  source 1..32: mol_type = other DNA
  misc_feature 13..14: note = DNA
  misc_feature order(1..12,15..32): note = RNA
  modified_base 12: mod_base = OTHER; note = 2-Prime-O-Methoxyethyl modified 5-methyl Uridine
  modified_base 13: mod_base = OTHER; note = DNA nucleotide carrying a 6-amino-5-nitro-3-yl-2(1H)-pyridone nucleobase
  modified_base order(2,7,9,16..17,24,26,29,32): mod_base = OTHER; note = 2-Prime-Fluoro modified nucleoside
  modified_base order(1,3..6,8,10..11,15,18..23,25,27..28,30..31): mod_base = OTHER; note = 2-Prime-O-Methyl modified nucleoside
  modified_base order(1^2,31^32): mod_base = OTHER; note = (1,3-dimethylimidazolidin-2-ylidene) Phosphoramidate linkage
  modified_base order(2..14,15..31): mod_base = OTHER; note = Phosphorothioate linkage
  modified_base 14^15: mod_base = OTHER; note = Methylphosphonate linkage
  misc_feature 1..32: note = RM115270

SEQ ID NO: 626 - DNA, 23 bp, synthetic construct
  source 1..23: mol_type = other DNA
  misc_feature 15..16: note = DNA
  misc_feature order(1..14,17..23): note = RNA
  modified_base 14: mod_base = OTHER; note = 2-Prime-O-Methoxyethyl modified 5-methyl Uridine
  modified_base 15: mod_base = OTHER; note = DNA nucleotide carrying a 6-amino-5-nitro-3-yl-2(1H)-pyridone nucleobase
  modified_base order(1,4,6,13,18,21): mod_base = OTHER; note = 2-Prime-Fluoro modified nucleoside
  modified_base order(2..3,5,7..12,17,19..20,22..23): mod_base = OTHER; note = 2-Prime-O-Methyl modified nucleoside
  modified_base order(1^2,22^23): mod_base = OTHER; note = (1,3-dimethylimidazolidin-2-ylidene) Phosphoramidate linkage
  modified_base order(2..16,17..22): mod_base = OTHER; note = Phosphorothioate linkage
  modified_base 16^17: mod_base = OTHER; note = Methylphosphonate linkage
  misc_feature 1..23: note = RM115271
ttggcccttcgtctnatggacaa

SEQ ID NO: 627 - DNA, 32 bp, synthetic construct; identical to SEQ ID NO: 74
  source 1..32: mol_type = other DNA
  misc_feature 25..26: note = DNA
  misc_feature order(1..24,27..32): note = RNA
  modified_base 24: mod_base = OTHER; note = 2-Prime-O-Methoxyethyl modified 5-methyl Uridine
  modified_base 25: mod_base = OTHER; note = DNA nucleotide carrying a 6-amino-5-nitro-3-yl-2(1H)-pyridone nucleobase
  modified_base order(11,14,16,23,28,31): mod_base = OTHER; note = 2-Prime-Fluoro modified nucleoside
  modified_base order(1..10,12..13,15,17..22,27,29..30,32): mod_base = OTHER; note = 2-Prime-O-Methyl modified nucleoside
  modified_base order(1^2,31^32): mod_base = OTHER; note = (1,3-dimethylimidazolidin-2-ylidene) Phosphoramidate linkage
  modified_base order(2..26,27..31): mod_base = OTHER; note = Phosphorothioate linkage
  modified_base 26^27: mod_base = OTHER; note = Methylphosphonate linkage
  misc_feature 1..32: note = RM115272

SEQ ID NO: 628 - DNA, 32 bp, synthetic construct; identical to SEQ ID NO: 75
  source 1..32: mol_type = other DNA
  misc_feature 22..23: note = DNA
  misc_feature order(1..21,24..32): note = RNA
  modified_base 21: mod_base = OTHER; note = 2-Prime-O-Methoxyethyl modified 5-methyl Uridine
  modified_base 22: mod_base = OTHER; note = DNA nucleotide carrying a 6-amino-5-nitro-3-yl-2(1H)-pyridone nucleobase
  modified_base order(8,11,13,20,25,28): mod_base = OTHER; note = 2-Prime-Fluoro modified nucleoside
  modified_base order(1..7,9..10,12,14..19,24,26..27,29..32): mod_base = OTHER; note = 2-Prime-O-Methyl modified nucleoside
  modified_base order(1^2,31^32): mod_base = OTHER; note = (1,3-dimethylimidazolidin-2-ylidene) Phosphoramidate linkage
  modified_base order(2..23,24..31): mod_base = OTHER; note = Phosphorothioate linkage
  modified_base 23^24: mod_base = OTHER; note = Methylphosphonate linkage
  misc_feature 1..32: note = RM115273

SEQ ID NO: 629 - DNA, 32 bp, synthetic construct; identical to SEQ ID NO: 76
  source 1..32: mol_type = other DNA
  misc_feature 19..20: note = DNA
  misc_feature order(1..18,21..32): note = RNA
  modified_base 18: mod_base = OTHER; note = 2-Prime-O-Methoxyethyl modified 5-methyl Uridine
  modified_base 19: mod_base = OTHER; note = DNA nucleotide carrying a 6-amino-5-nitro-3-yl-2(1H)-pyridone nucleobase
  modified_base order(5,8,10,17,22,25): mod_base = OTHER; note = 2-Prime-Fluoro modified nucleoside
  modified_base order(1..4,6..7,9,11..16,21,23..24,26..32): mod_base = OTHER; note = 2-Prime-O-Methyl modified nucleoside
  modified_base order(1^2,31^32): mod_base = OTHER; note = (1,3-dimethylimidazolidin-2-ylidene) Phosphoramidate linkage
  modified_base order(2..20,21..31): mod_base = OTHER; note = Phosphorothioate linkage
  modified_base 20^21: mod_base = OTHER; note = Methylphosphonate linkage
  misc_feature 1..32: note = RM115274

SEQ ID NO: 630 - DNA, 32 bp, synthetic construct; identical to SEQ ID NO: 77
  source 1..32: mol_type = other DNA
  misc_feature 16..17: note = DNA
  misc_feature order(1..15,18..32): note = RNA
  modified_base 15: mod_base = OTHER; note = 2-Prime-O-Methoxyethyl modified 5-methyl Uridine
  modified_base 16: mod_base = OTHER; note = DNA nucleotide carrying a 6-amino-5-nitro-3-yl-2(1H)-pyridone nucleobase
  modified_base order(2,5,7,14,19,22): mod_base = OTHER; note = 2-Prime-Fluoro modified nucleoside
  modified_base order(1,3..4,6,8..13,18,20..21,23..32): mod_base = OTHER; note = 2-Prime-O-Methyl modified nucleoside
  modified_base order(1^2,31^32): mod_base = OTHER; note = (1,3-dimethylimidazolidin-2-ylidene) Phosphoramidate linkage
  modified_base order(2..17,18..31): mod_base = OTHER; note = Phosphorothioate linkage
  modified_base 17^18: mod_base = OTHER; note = Methylphosphonate linkage
  misc_feature 1..32: note = RM115275

SEQ ID NO: 631 - DNA, 23 bp, synthetic construct
  source 1..23: mol_type = other DNA
  misc_feature 6..7: note = DNA
  misc_feature order(1..5,8..23): note = RNA
  modified_base 5: mod_base = OTHER; note = 2-Prime-O-Methoxyethyl modified 5-methyl Uridine
  modified_base 6: mod_base = OTHER; note = DNA nucleotide carrying a 6-amino-5-nitro-3-yl-2(1H)-pyridone nucleobase
  modified_base order(2,9..10,17,19,22): mod_base = OTHER; note = 2-Prime-Fluoro modified nucleoside
  modified_base order(1,3..4,8,11..16,18,20..21,23): mod_base = OTHER; note = 2-Prime-O-Methyl modified nucleoside
  modified_base order(1^2,22^23): mod_base = OTHER; note = (1,3-dimethylimidazolidin-2-ylidene) Phosphoramidate linkage
  modified_base order(2..7,8..22): mod_base = OTHER; note = Phosphorothioate linkage
  modified_base 7^8: mod_base = OTHER; note = Methylphosphonate linkage
  misc_feature 1..23: note = RM115276
cgtctnatggacaaagtctttaa

SEQ ID NO: 632 - DNA, 32 bp, synthetic construct; identical to SEQ ID NO: 77
  source 1..32: mol_type = other DNA
  misc_feature 16..17: note = DNA
  misc_feature order(1..15,18..32): note = RNA
  modified_base 15: mod_base = OTHER; note = 2-Prime-O-Methoxyethyl modified 5-methyl Uridine
  modified_base 16: mod_base = OTHER; note = DNA nucleotide carrying a 6-amino-5-nitro-3-yl-2(1H)-pyridone nucleobase
  modified_base order(12,19..20,27,29,32): mod_base = OTHER; note = 2-Prime-Fluoro modified nucleoside
  modified_base order(1..11,13..14,18,21..26,28,30..31): mod_base = OTHER; note = 2-Prime-O-Methyl modified nucleoside
  modified_base order(1^2,31^32): mod_base = OTHER; note = (1,3-dimethylimidazolidin-2-ylidene) Phosphoramidate linkage
  modified_base order(2..17,18..31): mod_base = OTHER; note = Phosphorothioate linkage
  modified_base 17^18: mod_base = OTHER; note = Methylphosphonate linkage
  misc_feature 1..32: note = RM115277

SEQ ID NO: 633 - DNA, 32 bp, synthetic construct; identical to SEQ ID NO: 78
  source 1..32: mol_type = other DNA
  misc_feature 13..14: note = DNA
  misc_feature order(1..12,15..32): note = RNA
  modified_base 12: mod_base = OTHER; note = 2-Prime-O-Methoxyethyl modified 5-methyl Uridine
  modified_base 13: mod_base = OTHER; note = DNA nucleotide carrying a 6-amino-5-nitro-3-yl-2(1H)-pyridone nucleobase
  modified_base order(9,16..17,24,26,29): mod_base = OTHER; note = 2-Prime-Fluoro modified nucleoside
  modified_base order(1..8,10..11,15,18..23,25,27..28,30..32): mod_base = OTHER; note = 2-Prime-O-Methyl modified nucleoside
  modified_base order(1^2,31^32): mod_base = OTHER; note = (1,3-dimethylimidazolidin-2-ylidene) Phosphoramidate linkage
  modified_base order(2..14,15..31): mod_base = OTHER; note = Phosphorothioate linkage
  modified_base 14^15: mod_base = OTHER; note = Methylphosphonate linkage
  misc_feature 1..32: note = RM115278

SEQ ID NO: 634 - DNA, 32 bp, synthetic construct; identical to SEQ ID NO: 79
  source 1..32: mol_type = other DNA
  misc_feature 10..11: note = DNA
  misc_feature order(1..9,12..32): note = RNA
  modified_base 9: mod_base = OTHER; note = 2-Prime-O-Methoxyethyl modified 5-methyl Uridine
  modified_base 10: mod_base = OTHER; note = DNA nucleotide carrying a 6-amino-5-nitro-3-yl-2(1H)-pyridone nucleobase
  modified_base order(6,13..14,21,23,26): mod_base = OTHER; note = 2-Prime-Fluoro modified nucleoside
  modified_base order(1..5,7..8,12,15..20,22,24..25,27..32): mod_base = OTHER; note = 2-Prime-O-Methyl modified nucleoside
  modified_base order(1^2,31^32): mod_base = OTHER; note = (1,3-dimethylimidazolidin-2-ylidene) Phosphoramidate linkage
  modified_base order(2..11,12..31): mod_base = OTHER; note = Phosphorothioate linkage
  modified_base 11^12: mod_base = OTHER; note = Methylphosphonate linkage
  misc_feature 1..32: note = RM115279

SEQ ID NO: 635 - DNA, 32 bp, synthetic construct; identical to SEQ ID NO: 80
  source 1..32: mol_type = other DNA
  misc_feature 7..8: note = DNA
  misc_feature order(1..6,9..32): note = RNA
  modified_base 6: mod_base = OTHER; note = 2-Prime-O-Methoxyethyl modified 5-methyl Uridine
  modified_base 7: mod_base = OTHER; note = DNA nucleotide carrying a 6-amino-5-nitro-3-yl-2(1H)-pyridone nucleobase
  modified_base order(3,10..11,18,20,23): mod_base = OTHER; note = 2-Prime-Fluoro modified nucleoside
  modified_base order(1..2,4..5,9,12..17,19,21..22,24..32): mod_base = OTHER; note = 2-Prime-O-Methyl modified nucleoside
  modified_base order(1^2,31^32): mod_base = OTHER; note = (1,3-dimethylimidazolidin-2-ylidene) Phosphoramidate linkage
  modified_base order(2..8,9..31): mod_base = OTHER; note = Phosphorothioate linkage
  modified_base 8^9: mod_base = OTHER; note = Methylphosphonate linkage
  misc_feature 1..32: note = RM115280

SEQ ID NO: 636 - DNA, 32 bp, synthetic construct; identical to SEQ ID NO: 74
  source 1..32: mol_type = other DNA
  misc_feature 25..26: note = DNA
  misc_feature order(1..24,27..32): note = RNA
  modified_base 24: mod_base = OTHER; note = 2-Prime-O-Methoxyethyl modified 5-methyl Uridine
  modified_base 25: mod_base = OTHER; note = DNA nucleotide carrying a 6-amino-5-nitro-3-yl-2(1H)-pyridone nucleobase
  modified_base order(23,28,31): mod_base = OTHER; note = 2-Prime-Fluoro modified nucleoside
  modified_base order(1..22,27,29..30,32): mod_base = OTHER; note = 2-Prime-O-Methyl modified nucleoside
  modified_base order(1^2,31^32): mod_base = OTHER; note = (1,3-dimethylimidazolidin-2-ylidene) Phosphoramidate linkage
  modified_base order(2..26,27..31): mod_base = OTHER; note = Phosphorothioate linkage
  modified_base 26^27: mod_base = OTHER; note = Methylphosphonate linkage
  misc_feature 1..32: note = RM115281

SEQ ID NO: 637 - DNA, 32 bp, synthetic construct; identical to SEQ ID NO: 75
  source 1..32: mol_type = other DNA
  misc_feature 22..23: note = DNA
  misc_feature order(1..21,24..32): note = RNA
  modified_base 21: mod_base = OTHER; note = 2-Prime-O-Methoxyethyl modified 5-methyl Uridine
  modified_base 22: mod_base = OTHER; note = DNA nucleotide carrying a 6-amino-5-nitro-3-yl-2(1H)-pyridone nucleobase
  modified_base order(20,25,28): mod_base = OTHER; note = 2-Prime-Fluoro modified nucleoside
  modified_base order(1..19,24,26..27,29..32): mod_base = OTHER; note = 2-Prime-O-Methyl modified nucleoside
  modified_base order(1^2,31^32): mod_base = OTHER; note = (1,3-dimethylimidazolidin-2-ylidene) Phosphoramidate linkage
  modified_base order(2..23,24..31): mod_base = OTHER; note = Phosphorothioate linkage
  modified_base 23^24: mod_base = OTHER; note = Methylphosphonate linkage
  misc_feature 1..32: note = RM115282

SEQ ID NO: 638 - DNA, 32 bp, synthetic construct; identical to SEQ ID NO: 76
  source 1..32: mol_type = other DNA
  misc_feature 19..20: note = DNA
  misc_feature order(1..18,21..32): note = RNA
  modified_base 18: mod_base = OTHER; note = 2-Prime-O-Methoxyethyl modified 5-methyl Uridine
  modified_base 19: mod_base = OTHER; note = DNA nucleotide carrying a 6-amino-5-nitro-3-yl-2(1H)-pyridone nucleobase
  modified_base order(17,22,25): mod_base = OTHER; note = 2-Prime-Fluoro modified nucleoside
  modified_base order(1..16,21,23..24,26..32): mod_base = OTHER; note = 2-Prime-O-Methyl modified nucleoside
  modified_base order(1^2,31^32): mod_base = OTHER; note = (1,3-dimethylimidazolidin-2-ylidene) Phosphoramidate linkage
  modified_base order(2..20,21..31): mod_base = OTHER; note = Phosphorothioate linkage
  modified_base 20^21: mod_base = OTHER; note = Methylphosphonate linkage
  misc_feature 1..32: note = RM115283

SEQ ID NO: 639 - DNA, 32 bp, synthetic construct; identical to SEQ ID NO: 77
  source 1..32: mol_type = other DNA
  misc_feature 16..17: note = DNA
  misc_feature order(1..15,18..32): note = RNA
  modified_base 15: mod_base = OTHER; note = 2-Prime-O-Methoxyethyl modified 5-methyl Uridine
  modified_base 16: mod_base = OTHER; note = DNA nucleotide carrying a 6-amino-5-nitro-3-yl-2(1H)-pyridone nucleobase
  modified_base order(14,19,22): mod_base = OTHER; note = 2-Prime-Fluoro modified nucleoside
  modified_base order(1..13,18,20..21,23..32): mod_base = OTHER; note = 2-Prime-O-Methyl modified nucleoside
  modified_base order(1^2,31^32): mod_base = OTHER; note = (1,3-dimethylimidazolidin-2-ylidene) Phosphoramidate linkage
  modified_base order(2..17,18..31): mod_base = OTHER; note = Phosphorothioate linkage
  modified_base 17^18: mod_base = OTHER; note = Methylphosphonate linkage
  misc_feature 1..32: note = RM115284

SEQ ID NO: 640 - DNA, 32 bp, synthetic construct; identical to SEQ ID NO: 78
  source 1..32: mol_type = other DNA
  misc_feature 13..14: note = DNA
  misc_feature order(1..12,15..32): note = RNA
  modified_base 12: mod_base = OTHER; note = 2-Prime-O-Methoxyethyl modified 5-methyl Uridine
  modified_base 13: mod_base = OTHER; note = DNA nucleotide carrying a 6-amino-5-nitro-3-yl-2(1H)-pyridone nucleobase
  modified_base order(11,16,19): mod_base = OTHER; note = 2-Prime-Fluoro modified nucleoside
  modified_base order(1..10,15,17..18,20..32): mod_base = OTHER; note = 2-Prime-O-Methyl modified nucleoside
  modified_base order(1^2,31^32): mod_base = OTHER; note = (1,3-dimethylimidazolidin-2-ylidene) Phosphoramidate linkage
  modified_base order(2..14,15..31): mod_base = OTHER; note = Phosphorothioate linkage
  modified_base 14^15: mod_base = OTHER; note = Methylphosphonate linkage
  misc_feature 1..32: note = RM115285

SEQ ID NO: 641 - DNA, 32 bp, synthetic construct; identical to SEQ ID NO: 79
  source 1..32: mol_type = other DNA
  misc_feature 10..11: note = DNA
  misc_feature order(1..9,12..32): note = RNA
  modified_base 9: mod_base = OTHER; note = 2-Prime-O-Methoxyethyl modified 5-methyl Uridine
  modified_base 10: mod_base = OTHER; note = DNA nucleotide carrying a 6-amino-5-nitro-3-yl-2(1H)-pyridone nucleobase
  modified_base order(8,13,16): mod_base = OTHER; note = 2-Prime-Fluoro modified nucleoside
  modified_base order(1..7,12,14..15,17..32): mod_base = OTHER; note = 2-Prime-O-Methyl modified nucleoside
  modified_base order(1^2,31^32): mod_base = OTHER; note = (1,3-dimethylimidazolidin-2-ylidene) Phosphoramidate linkage
  modified_base order(2..11,12..31): mod_base = OTHER; note = Phosphorothioate linkage
  modified_base 11^12: mod_base = OTHER; note = Methylphosphonate linkage
  misc_feature 1..32: note = RM115286

SEQ ID NO: 642 - DNA, 32 bp, synthetic construct; identical to SEQ ID NO: 80
  source 1..32: mol_type = other DNA
  misc_feature 7..8: note = DNA
  misc_feature order(1..6,9..32): note = RNA
  modified_base 6: mod_base = OTHER; note = 2-Prime-O-Methoxyethyl modified 5-methyl Uridine
  modified_base 7: mod_base = OTHER; note = DNA nucleotide carrying a 6-amino-5-nitro-3-yl-2(1H)-pyridone nucleobase
  modified_base order(5,10,13): mod_base = OTHER; note = 2-Prime-Fluoro modified nucleoside
  modified_base order(1..4,9,11..12,14..32): mod_base = OTHER; note = 2-Prime-O-Methyl modified nucleoside
  modified_base order(1^2,31^32): mod_base = OTHER; note = (1,3-dimethylimidazolidin-2-ylidene) Phosphoramidate linkage
  modified_base order(2..8,9..31): mod_base = OTHER; note = Phosphorothioate linkage
  modified_base 8^9: mod_base = OTHER; note = Methylphosphonate linkage
  misc_feature 1..32: note = RM115287

SEQ ID NO: 643 - DNA, 32 bp, synthetic construct; identical to SEQ ID NO: 73
  source 1..32: mol_type = other DNA
  misc_feature 28..29: note = DNA
  misc_feature order(1..27,30..32): note = RNA
  modified_base 27: mod_base = OTHER; note = 2-Prime-O-Methoxyethyl modified 5-methyl Uridine
  modified_base 28: mod_base = OTHER; note = DNA nucleotide carrying a 6-amino-5-nitro-3-yl-2(1H)-pyridone nucleobase
  modified_base order(24,31..32): mod_base = OTHER; note = 2-Prime-Fluoro modified nucleoside
  modified_base order(1..23,25..26,30): mod_base = OTHER; note = 2-Prime-O-Methyl modified nucleoside
  modified_base order(1^2,31^32): mod_base = OTHER; note = (1,3-dimethylimidazolidin-2-ylidene) Phosphoramidate linkage
  modified_base order(2..29,30^31): mod_base = OTHER; note = Phosphorothioate linkage
  modified_base 29^30: mod_base = OTHER; note = Methylphosphonate linkage
  misc_feature 1..32: note = RM115288

SEQ ID NO: 644 - DNA, 32 bp, synthetic construct; identical to SEQ ID NO: 74
  source 1..32: mol_type = other DNA
  misc_feature 25..26: note = DNA
  misc_feature order(1..24,27..32): note = RNA
  modified_base 24: mod_base = OTHER; note = 2-Prime-O-Methoxyethyl modified 5-methyl Uridine
  modified_base 25: mod_base = OTHER; note = DNA nucleotide carrying a 6-amino-5-nitro-3-yl-2(1H)-pyridone nucleobase
  modified_base order(21,28..29): mod_base = OTHER; note = 2-Prime-Fluoro modified nucleoside
  modified_base order(1..20,22..23,27,30..32): mod_base = OTHER; note = 2-Prime-O-Methyl modified nucleoside
  modified_base order(1^2,31^32): mod_base = OTHER; note = (1,3-dimethylimidazolidin-2-ylidene) Phosphoramidate linkage
  modified_base order(2..26,27..31): mod_base = OTHER; note = Phosphorothioate linkage
  modified_base 26^27: mod_base = OTHER; note = Methylphosphonate linkage
  misc_feature 1..32: note = RM115289

SEQ ID NO: 645 - DNA, 32 bp, synthetic construct; identical to SEQ ID NO: 75
  source 1..32: mol_type = other DNA
  misc_feature 22..23: note = DNA
  misc_feature order(1..21,24..32): note = RNA
  modified_base 21: mod_base = OTHER; note = 2-Prime-O-Methoxyethyl modified 5-methyl Uridine
  modified_base 22: mod_base = OTHER; note = DNA nucleotide carrying a 6-amino-5-nitro-3-yl-2(1H)-pyridone nucleobase
  modified_base order(18,25..26): mod_base = OTHER; note = 2-Prime-Fluoro modified nucleoside
  modified_base order(1..17,19..20,24,27..32): mod_base = OTHER; note = 2-Prime-O-Methyl modified nucleoside
  modified_base order(1^2,31^32): mod_base = OTHER; note = (1,3-dimethylimidazolidin-2-ylidene) Phosphoramidate linkage
  modified_base order(2..23,24..31): mod_base = OTHER; note = Phosphorothioate linkage
  modified_base 23^24: mod_base = OTHER; note = Methylphosphonate linkage
  misc_feature 1..32: note = RM115290

SEQ ID NO: 646 - DNA, 32 bp, synthetic construct; identical to SEQ ID NO: 76
  source 1..32: mol_type = other DNA
  misc_feature 19..20: note = DNA
  misc_feature order(1..18,21..32): note = RNA
  modified_base 18: mod_base = OTHER; note = 2-Prime-O-Methoxyethyl modified 5-methyl Uridine
  modified_base 19: mod_base = OTHER; note = DNA nucleotide carrying a 6-amino-5-nitro-3-yl-2(1H)-pyridone nucleobase
  modified_base order(15,22..23): mod_base = OTHER; note = 2-Prime-Fluoro modified nucleoside
  modified_base order(1..14,16..17,21,24..32): mod_base = OTHER; note = 2-Prime-O-Methyl modified nucleoside
  modified_base order(1^2,31^32): mod_base = OTHER; note = (1,3-dimethylimidazolidin-2-ylidene) Phosphoramidate linkage
  modified_base order(2..20,21..31): mod_base = OTHER; note = Phosphorothioate linkage
  modified_base 20^21: mod_base = OTHER; note = Methylphosphonate linkage
  misc_feature 1..32: note = RM115291

SEQ ID NO: 647 - DNA, 32 bp, synthetic construct; identical to SEQ ID NO: 77
  source 1..32: mol_type = other DNA
  misc_feature 16..17: note = DNA
  misc_feature order(1..15,18..32): note = RNA
  modified_base 15: mod_base = OTHER; note = 2-Prime-O-Methoxyethyl modified 5-methyl Uridine
  modified_base 16: mod_base = OTHER; note = DNA nucleotide carrying a 6-amino-5-nitro-3-yl-2(1H)-pyridone nucleobase
  modified_base order(12,19..20): mod_base = OTHER; note = 2-Prime-Fluoro modified nucleoside
  modified_base order(1..11,13..14,18,21..32): mod_base = OTHER; note = 2-Prime-O-Methyl modified nucleoside
  modified_base order(1^2,31^32): mod_base = OTHER; note = (1,3-dimethylimidazolidin-2-ylidene) Phosphoramidate linkage
  modified_base order(2..17,18..31): mod_base = OTHER; note = Phosphorothioate linkage
  modified_base 17^18: mod_base = OTHER; note = Methylphosphonate linkage
  misc_feature 1..32: note = RM115292

SEQ ID NO: 648 - DNA, 32 bp, synthetic construct; identical to SEQ ID NO: 78
  source 1..32: mol_type = other DNA
  misc_feature 13..14: note = DNA
  misc_feature order(1..12,15..32): note = RNA
  modified_base 12: mod_base = OTHER; note = 2-Prime-O-Methoxyethyl modified 5-methyl Uridine
  modified_base 13: mod_base = OTHER; note = DNA nucleotide carrying a 6-amino-5-nitro-3-yl-2(1H)-pyridone nucleobase
  modified_base order(9,16..17): mod_base = OTHER; note = 2-Prime-Fluoro modified nucleoside
  modified_base order(1..8,10..11,15,18..32): mod_base = OTHER; note = 2-Prime-O-Methyl modified nucleoside
  modified_base order(1^2,31^32): mod_base = OTHER; note = (1,3-dimethylimidazolidin-2-ylidene) Phosphoramidate linkage
  modified_base order(2..14,15..31): mod_base = OTHER; note = Phosphorothioate linkage
  modified_base 14^15: mod_base = OTHER; note = Methylphosphonate linkage
  misc_feature 1..32: note = RM115293

SEQ ID NO: 649 - DNA, 32 bp, synthetic construct; identical to SEQ ID NO: 79
  source 1..32: mol_type = other DNA
  misc_feature 10..11: note = DNA
  misc_feature order(1..9,12..32): note = RNA
  modified_base 9: mod_base = OTHER; note = 2-Prime-O-Methoxyethyl modified 5-methyl Uridine
  modified_base 10: mod_base = OTHER; note = DNA nucleotide carrying a 6-amino-5-nitro-3-yl-2(1H)-pyridone nucleobase
  modified_base order(6,13..14): mod_base = OTHER; note = 2-Prime-Fluoro modified nucleoside
  modified_base order(1..5,7..8,12,15..32): mod_base = OTHER; note = 2-Prime-O-Methyl modified nucleoside
  modified_base order(1^2,31^32): mod_base = OTHER; note = (1,3-dimethylimidazolidin-2-ylidene) Phosphoramidate linkage
  modified_base order(2..11,12..31): mod_base = OTHER; note = Phosphorothioate linkage
  modified_base 11^12: mod_base = OTHER; note = Methylphosphonate linkage
  misc_feature 1..32: note = RM115294

SEQ ID NO: 650 - DNA, 32 bp, synthetic construct; identical to SEQ ID NO: 80
  source 1..32: mol_type = other DNA
  misc_feature 7..8: note = DNA
  misc_feature order(1..6,9..32): note = RNA
  modified_base 6: mod_base = OTHER; note = 2-Prime-O-Methoxyethyl modified 5-methyl Uridine
  modified_base 7: mod_base = OTHER; note = DNA nucleotide carrying a 6-amino-5-nitro-3-yl-2(1H)-pyridone nucleobase
  modified_base order(3,10..11): mod_base = OTHER; note = 2-Prime-Fluoro modified nucleoside
  modified_base order(1..2,4..5,9,12..32): mod_base = OTHER; note = 2-Prime-O-Methyl modified nucleoside
  modified_base order(1^2,31^32): mod_base = OTHER; note = (1,3-dimethylimidazolidin-2-ylidene) Phosphoramidate linkage
  modified_base order(2..8,9..31): mod_base = OTHER; note = Phosphorothioate linkage
  modified_base 8^9: mod_base = OTHER; note = Methylphosphonate linkage
  misc_feature 1..32: note = RM115295

SEQ ID NO: 651 - DNA, 26 bp, synthetic construct
  source 1..26: mol_type = other DNA
  misc_feature 7..8: note = DNA
  misc_feature order(1..6,9..26): note = RNA
  modified_base 6: mod_base = OTHER; note = 2-Prime-O-Methoxyethyl modified 5-methyl Uridine
  modified_base 7: mod_base = OTHER; note = DNA nucleotide carrying a 6-amino-5-nitro-3-yl-2(1H)-pyridone nucleobase
  modified_base order(3,10,12,18,20,23..24): mod_base = OTHER; note = 2-Prime-Fluoro modified nucleoside
  modified_base order(1..2,4..5,9,11,13..17,19,21..22,25..26): mod_base = OTHER; note = 2-Prime-O-Methyl modified nucleoside
  modified_base order(1^2,25^26): mod_base = OTHER; note = (1,3-dimethylimidazolidin-2-ylidene) Phosphoramidate linkage
  modified_base order(2..8,9..25): mod_base = OTHER; note = Phosphorothioate linkage
  modified_base 8^9: mod_base = OTHER; note = Methylphosphonate linkage
  misc_feature 1..26: note = RM115296
tcgtctnatggacaaagtctttaaga

SEQ ID NO: 652 - DNA, 26 bp, synthetic construct
  source 1..26: mol_type = other DNA
  misc_feature 19..20: note = DNA
  misc_feature order(1..18,21..26): note = RNA
  modified_base 18: mod_base = OTHER; note = 2-Prime-O-Methoxyethyl modified 5-methyl Uridine
  modified_base 19: mod_base = OTHER; note = DNA nucleotide carrying a 6-amino-5-nitro-3-yl-2(1H)-pyridone nucleobase
  modified_base order(4..5,8,10,16,22,25): mod_base = OTHER; note = 2-Prime-Fluoro modified nucleoside
  modified_base order(1..3,6..7,9,11..15,17,21,23..24,26): mod_base = OTHER; note = 2-Prime-O-Methyl modified nucleoside
  modified_base order(1^2,25^26): mod_base = OTHER; note = (1,3-dimethylimidazolidin-2-ylidene) Phosphoramidate linkage
  modified_base order(2..20,21..25): mod_base = OTHER; note = Phosphorothioate linkage
  modified_base 20^21: mod_base = OTHER; note = Methylphosphonate linkage
  misc_feature 1..26: note = RM115297
taatttggcccttcgtctnatggaca

SEQ ID NO: 653 - DNA, 26 bp, synthetic construct
  source 1..26: mol_type = other DNA
  misc_feature 16..17: note = DNA
  misc_feature order(1..15,18..26): note = RNA
  modified_base 15: mod_base = OTHER; note = 2-Prime-O-Methoxyethyl modified 5-methyl Uridine
  modified_base 16: mod_base = OTHER; note = DNA nucleotide carrying a 6-amino-5-nitro-3-yl-2(1H)-pyridone nucleobase
  modified_base order(1..2,5,7,13,19,22): mod_base = OTHER; note = 2-Prime-Fluoro modified nucleoside
  modified_base order(3..4,6,8..12,14,18,20..21,23..26): mod_base = OTHER; note = 2-Prime-O-Methyl modified nucleoside
  modified_base order(1^2,25^26): mod_base = OTHER; note = (1,3-dimethylimidazolidin-2-ylidene) Phosphoramidate linkage
  modified_base order(2..17,18..25): mod_base = OTHER; note = Phosphorothioate linkage
  modified_base 17^18: mod_base = OTHER; note = Methylphosphonate linkage
  misc_feature 1..26: note = RM115298
tttggcccttcgtctnatggacaaag

SEQ ID NO: 654 - DNA, 26 bp, synthetic construct
  source 1..26: mol_type = other DNA
  misc_feature 13..14: note = DNA
  misc_feature order(1..12,15..26): note = RNA
  modified_base 12: mod_base = OTHER; note = 2-Prime-O-Methoxyethyl modified 5-methyl Uridine
  modified_base 13: mod_base = OTHER; note = DNA nucleotide carrying a 6-amino-5-nitro-3-yl-2(1H)-pyridone nucleobase
  modified_base order(9,16,18,24,26): mod_base = OTHER; note = 2-Prime-Fluoro modified nucleoside
  modified_base order(1..8,10..11,15,17,19..23,25): mod_base = OTHER; note = 2-Prime-O-Methyl modified nucleoside
  modified_base order(1^2,25^26): mod_base = OTHER; note = (1,3-dimethylimidazolidin-2-ylidene) Phosphoramidate linkage
  modified_base order(2..14,15..25): mod_base = OTHER; note = Phosphorothioate linkage
  modified_base 14^15: mod_base = OTHER; note = Methylphosphonate linkage
  misc_feature 1..26: note = RM115299
ggcccttcgtctnatggacaaagtct

SEQ ID NO: 655 - DNA, 26 bp, synthetic construct
  source 1..26: mol_type = other DNA
  misc_feature 10..11: note = DNA
  misc_feature order(1..9,12..26): note = RNA
  modified_base 9: mod_base = OTHER; note = 2-Prime-O-Methoxyethyl modified 5-methyl Uridine
  modified_base 10: mod_base = OTHER; note = DNA nucleotide carrying a 6-amino-5-nitro-3-yl-2(1H)-pyridone nucleobase
  modified_base order(6,13,15,21,23): mod_base = OTHER; note = 2-Prime-Fluoro modified nucleoside
  modified_base order(1..5,7..8,12,14,16..20,22,24..26): mod_base = OTHER; note = 2-Prime-O-Methyl modified nucleoside
  modified_base order(1^2,25^26): mod_base = OTHER; note = (1,3-dimethylimidazolidin-2-ylidene) Phosphoramidate linkage
  modified_base order(2..11,12..25): mod_base = OTHER; note = Phosphorothioate linkage
  modified_base 11^12: mod_base = OTHER; note = Methylphosphonate linkage
  misc_feature 1..26: note = RM115300
ccttcgtctnatggacaaagtcttta

SEQ ID NO: 656 - DNA, 26 bp, synthetic construct
  source 1..26: mol_type = other DNA
  misc_feature 7..8: note = DNA
  misc_feature order(1..6,9..26): note = RNA
  modified_base 6: mod_base = OTHER; note = 2-Prime-O-Methoxyethyl modified 5-methyl Uridine
  modified_base 7: mod_base = OTHER; note = DNA nucleotide carrying a 6-amino-5-nitro-3-yl-2(1H)-pyridone nucleobase
  modified_base order(3,10,12,18,20): mod_base = OTHER; note = 2-Prime-Fluoro modified nucleoside
  modified_base order(1..2,4..5,9,11,13..17,19,21..26): mod_base = OTHER; note = 2-Prime-O-Methyl modified nucleoside
  modified_base order(1^2,25^26): mod_base = OTHER; note = (1,3-dimethylimidazolidin-2-ylidene) Phosphoramidate linkage
  modified_base order(2..8,9..25): mod_base = OTHER; note = Phosphorothioate linkage
  modified_base 8^9: mod_base = OTHER; note = Methylphosphonate linkage
  misc_feature 1..26: note = RM115301
tcgtctnatggacaaagtctttaaga

SEQ ID NO: 657 - DNA, 29 bp, synthetic construct
  source 1..29: mol_type = other DNA
  misc_feature 15..16: note = DNA
  misc_feature order(1..14,17..29): note = RNA
  modified_base 14: mod_base = OTHER; note = 2-Prime-O-Methoxyethyl modified 5-methyl Uridine
  modified_base 15: mod_base = OTHER; note = DNA nucleotide carrying a 6-amino-5-nitro-3-yl-2(1H)-pyridone nucleobase
  modified_base order(11,18,20,26,28): mod_base = OTHER; note = 2-Prime-Fluoro modified nucleoside
  modified_base order(1..10,12..13,17,19,21..25,27,29): mod_base = OTHER; note = 2-Prime-O-Methyl modified nucleoside
  modified_base order(1^2,28^29): mod_base = OTHER; note = (1,3-dimethylimidazolidin-2-ylidene) Phosphoramidate linkage
  modified_base order(2..16,17..28): mod_base = OTHER; note = Phosphorothioate linkage
  modified_base 16^17: mod_base = OTHER; note = Methylphosphonate linkage
  misc_feature 1..29: note = RM115302
ttggcccttcgtctnatggacaaagtctt

SEQ ID NO: 658 - DNA, 29 bp, synthetic construct
  source 1..29: mol_type = other DNA
  misc_feature 12..13: note = DNA
  misc_feature order(1..11,14..29): note = RNA
  modified_base 11: mod_base = OTHER; note = 2-Prime-O-Methoxyethyl modified 5-methyl Uridine
  modified_base 12: mod_base = OTHER; note = DNA nucleotide carrying a 6-amino-5-nitro-3-yl-2(1H)-pyridone nucleobase
  modified_base order(8,15,17,23,25): mod_base = OTHER; note = 2-Prime-Fluoro modified nucleoside
  modified_base order(1..7,9..10,14,16,18..22,24,26..29): mod_base = OTHER; note = 2-Prime-O-Methyl modified nucleoside
  modified_base order(1^2,28^29): mod_base = OTHER; note = (1,3-dimethylimidazolidin-2-ylidene) Phosphoramidate linkage
  modified_base order(2..13,14..28): mod_base = OTHER; note = Phosphorothioate linkage
  modified_base 13^14: mod_base = OTHER; note = Methylphosphonate linkage
  misc_feature 1..29: note = RM115303
gcccttcgtctnatggacaaagtctttaa

SEQ ID NO: 659 - DNA, 29 bp, synthetic construct
  source 1..29: mol_type = other DNA
  misc_feature 9..10: note = DNA
  misc_feature order(1..8,11..29): note = RNA
  modified_base 8: mod_base = OTHER; note = 2-Prime-O-Methoxyethyl modified 5-methyl Uridine
  modified_base 9: mod_base = OTHER; note = DNA nucleotide carrying a 6-amino-5-nitro-3-yl-2(1H)-pyridone nucleobase
  modified_base order(5,12,14,20,22): mod_base = OTHER; note = 2-Prime-Fluoro modified nucleoside
  modified_base order(1..4,6..7,11,13,15..19,21,23..29): mod_base = OTHER; note = 2-Prime-O-Methyl modified nucleoside
  modified_base order(1^2,28^29): mod_base = OTHER; note = (1,3-dimethylimidazolidin-2-ylidene) Phosphoramidate linkage
  modified_base order(2..10,11..28): mod_base = OTHER; note = Phosphorothioate linkage
  modified_base 10^11: mod_base = OTHER; note = Methylphosphonate linkage
  misc_feature 1..29: note = RM115304
cttcgtctnatggacaaagtctttaagac

SEQ ID NO: 660 - DNA, 29 bp, synthetic construct
  source 1..29: mol_type = other DNA
  misc_feature 6..7: note = DNA
  misc_feature order(1..5,8..29): note = RNA
  modified_base 5: mod_base = OTHER; note = 2-Prime-O-Methoxyethyl modified 5-methyl Uridine
  modified_base 6: mod_base = OTHER; note = DNA nucleotide carrying a 6-amino-5-nitro-3-yl-2(1H)-pyridone nucleobase
  modified_base order(2,9,11,17,19): mod_base = OTHER; note = 2-Prime-Fluoro modified nucleoside
  modified_base order(1,3..4,8,10,12..16,18,20..29): mod_base = OTHER; note = 2-Prime-O-Methyl modified nucleoside
  modified_base order(1^2,28^29): mod_base = OTHER; note = (1,3-dimethylimidazolidin-2-ylidene) Phosphoramidate linkage
  modified_base order(2..7,8..28): mod_base = OTHER; note = Phosphorothioate linkage
  modified_base 7^8: mod_base = OTHER; note = Methylphosphonate linkage
  misc_feature 1..29: note = RM115305
cgtctnatggacaaagtctttaagaccat

SEQ ID NO: 661 - DNA, 26 bp, synthetic construct
  source 1..26: mol_type = other DNA
  misc_feature 19..20: note = DNA
  misc_feature order(1..18,21..26): note = RNA
  modified_base 18: mod_base = OTHER; note = 2-Prime-O-Methoxyethyl modified 5-methyl Uridine
  modified_base 19: mod_base = OTHER; note = DNA nucleotide carrying a 6-amino-5-nitro-3-yl-2(1H)-pyridone nucleobase
  modified_base order(8,10,16,22,25): mod_base = OTHER; note = 2-Prime-Fluoro modified nucleoside
  modified_base order(1..7,9,11..15,17,21,23..24,26): mod_base = OTHER; note = 2-Prime-O-Methyl modified nucleoside
  modified_base order(1^2,25^26): mod_base = OTHER; note = (1,3-dimethylimidazolidin-2-ylidene) Phosphoramidate linkage
  modified_base order(2..20,21..25): mod_base = OTHER; note = Phosphorothioate linkage
  modified_base 20^21: mod_base = OTHER; note = Methylphosphonate linkage
  misc_feature 1..26: note = RM115306
taatttggcccttcgtctnatggaca

SEQ ID NO: 662 - DNA, 26 bp, synthetic construct
  source 1..26: mol_type = other DNA
  misc_feature 16..17: note = DNA
  misc_feature order(1..15,18..26): note = RNA
  modified_base 15: mod_base = OTHER; note = 2-Prime-O-Methoxyethyl modified 5-methyl Uridine
  modified_base 16: mod_base = OTHER; note = DNA nucleotide carrying a 6-amino-5-nitro-3-yl-2(1H)-pyridone nucleobase
  modified_base order(5,7,13,19,22): mod_base = OTHER; note = 2-Prime-Fluoro modified nucleoside
  modified_base order(1..4,6,8..12,14,18,20..21,23..26): mod_base = OTHER; note = 2-Prime-O-Methyl modified nucleoside
  modified_base order(1^2,25^26): mod_base = OTHER; note = (1,3-dimethylimidazolidin-2-ylidene) Phosphoramidate linkage
  modified_base order(2..17,18..25): mod_base = OTHER; note = Phosphorothioate linkage
  modified_base 17^18: mod_base = OTHER; note = Methylphosphonate linkage
  misc_feature 1..26: note = RM115307
tttggcccttcgtctnatggacaaag

SEQ ID NO: 663 - DNA, 26 bp, synthetic construct
  source 1..26: mol_type = other DNA
  misc_feature 13..14: note = DNA
  misc_feature order(1..12,15..26): note = RNA
  modified_base 12: mod_base = OTHER; note = 2-Prime-O-Methoxyethyl modified 5-methyl Uridine
  modified_base 13: mod_base = OTHER; note = DNA nucleotide carrying a 6-amino-5-nitro-3-yl-2(1H)-pyridone nucleobase
  modified_base order(2,4,10,16,19): mod_base = OTHER; note = 2-Prime-Fluoro modified nucleoside
  modified_base order(1,3,5..9,11,15,17..18,20..26): mod_base = OTHER; note = 2-Prime-O-Methyl modified nucleoside
  modified_base order(1^2,25^26): mod_base = OTHER; note = (1,3-dimethylimidazolidin-2-ylidene) Phosphoramidate linkage
  modified_base order(2..14,15..25): mod_base = OTHER; note = Phosphorothioate linkage
  modified_base 14^15: mod_base = OTHER; note = Methylphosphonate linkage
  misc_feature 1..26: note = RM115308
ggcccttcgtctnatggacaaagtct

SEQ ID NO: 664 - DNA, 29 bp, synthetic construct
  source 1..29: mol_type = other DNA
  misc_feature 21..22: note = DNA
  misc_feature order(1..20,23..29): note = RNA
  modified_base 20: mod_base = OTHER; note = 2-Prime-O-Methoxyethyl modified 5-methyl Uridine
  modified_base 21: mod_base = OTHER; note = DNA nucleotide carrying a 6-amino-5-nitro-3-yl-2(1H)-pyridone nucleobase
  modified_base order(10,12,18,24,27): mod_base = OTHER; note = 2-Prime-Fluoro modified nucleoside
  modified_base order(1..9,11,13..17,19,23,25..26,28..29): mod_base = OTHER; note = 2-Prime-O-Methyl modified nucleoside
  modified_base order(1^2,28^29): mod_base = OTHER; note = (1,3-dimethylimidazolidin-2-ylidene) Phosphoramidate linkage
  modified_base order(2..22,23..28): mod_base = OTHER; note = Phosphorothioate linkage
  modified_base 22^23: mod_base = OTHER; note = Methylphosphonate linkage
  misc_feature 1..29: note = RM115309
attaatttggcccttcgtctnatggacaa

SEQ ID NO: 665 - DNA, 29 bp, synthetic construct
  source 1..29: mol_type = other DNA
  misc_feature 18..19: note = DNA
  misc_feature order(1..17,20..29): note = RNA
  modified_base 17: mod_base = OTHER; note = 2-Prime-O-Methoxyethyl modified 5-methyl Uridine
  modified_base 18: mod_base = OTHER; note = DNA nucleotide carrying a 6-amino-5-nitro-3-yl-2(1H)-pyridone nucleobase
  modified_base order(7,9,15,21,24): mod_base = OTHER; note = 2-Prime-Fluoro modified nucleoside
  modified_base order(1..6,8,10..14,16,20,22..23,25..29): mod_base = OTHER; note = 2-Prime-O-Methyl modified nucleoside
  modified_base order(1^2,28^29): mod_base = OTHER; note = (1,3-dimethylimidazolidin-2-ylidene) Phosphoramidate linkage
  modified_base order(2..19,20..28): mod_base = OTHER; note = Phosphorothioate linkage
  modified_base 19^20: mod_base = OTHER; note = Methylphosphonate linkage
  misc_feature 1..29: note = RM115310
aatttggcccttcgtctnatggacaaagt

SEQ ID NO: 666 - DNA, 29 bp, synthetic construct
  source 1..29: mol_type = other DNA
  misc_feature 15..16: note = DNA
  misc_feature order(1..14,17..29): note = RNA
  modified_base 14: mod_base = OTHER; note = 2-Prime-O-Methoxyethyl modified 5-methyl Uridine
  modified_base 15: mod_base = OTHER; note = DNA nucleotide carrying a 6-amino-5-nitro-3-yl-2(1H)-pyridone nucleobase
  modified_base order(4,6,12,18,21): mod_base = OTHER; note = 2-Prime-Fluoro modified nucleoside
  modified_base order(1..3,5,7..11,13,17,19..20,22..29): mod_base = OTHER; note = 2-Prime-O-Methyl modified nucleoside
  modified_base order(1^2,28^29): mod_base = OTHER; note = (1,3-dimethylimidazolidin-2-ylidene) Phosphoramidate linkage
  modified_base order(2..16,17..28): mod_base = OTHER; note = Phosphorothioate linkage
  modified_base 16^17: mod_base = OTHER; note = Methylphosphonate linkage
  misc_feature 1..29: note = RM115311
ttggcccttcgtctnatggacaaagtctt

SEQ ID NO: 667 - DNA, 29 bp, synthetic construct
  source 1..29: mol_type = other DNA
  misc_feature 12..13: note = DNA
  misc_feature order(1..11,14..29): note = RNA
  modified_base 11: mod_base = OTHER; note = 2-Prime-O-Methoxyethyl modified 5-methyl Uridine
  modified_base 12: mod_base = OTHER; note = DNA nucleotide carrying a 6-amino-5-nitro-3-yl-2(1H)-pyridone nucleobase
  modified_base order(1,3,9,15,18): mod_base = OTHER; note = 2-Prime-Fluoro modified nucleoside
  modified_base order(2,4..8,10,14,16..17,19..29): mod_base = OTHER; note = 2-Prime-O-Methyl modified nucleoside
  modified_base order(1^2,28^29): mod_base = OTHER; note = (1,3-dimethylimidazolidin-2-ylidene) Phosphoramidate linkage
  modified_base order(2..13,14..28): mod_base = OTHER; note = Phosphorothioate linkage
  modified_base 13^14: mod_base = OTHER; note = Methylphosphonate linkage
  misc_feature 1..29: note = RM115312
gcccttcgtctnatggacaaagtctttaa

SEQ ID NO: 668 - DNA, 26 bp, synthetic construct
  source 1..26: mol_type = other DNA
  misc_feature 16..17: note = DNA
  misc_feature order(1..15,18..26): note = RNA
  modified_base 15: mod_base = OTHER; note = 2-Prime-O-Methoxyethyl modified 5-methyl Uridine
  modified_base 16: mod_base = OTHER; note = DNA nucleotide carrying a 6-amino-5-nitro-3-yl-2(1H)-pyridone nucleobase
  modified_base order(1..2,12,19..20,24..25): mod_base = OTHER; note = 2-Prime-Fluoro modified nucleoside
  modified_base order(3..11,13..14,18,21..23,26): mod_base = OTHER; note = 2-Prime-O-Methyl modified nucleoside
  modified_base order(1^2,25^26): mod_base = OTHER; note = (1,3-dimethylimidazolidin-2-ylidene) Phosphoramidate linkage
  modified_base order(2..17,18..25): mod_base = OTHER; note = Phosphorothioate linkage
  modified_base 17^18: mod_base = OTHER; note = Methylphosphonate linkage
  misc_feature 1..26: note = RM115313
tttggcccttcgtctnatggacaaag

SEQ ID NO: 669 - DNA, 26 bp, synthetic construct
  source 1..26: mol_type = other DNA
  misc_feature 16..17: note = DNA
  misc_feature order(1..15,18..26): note = RNA
  modified_base 15: mod_base = OTHER; note = 2-Prime-O-Methoxyethyl modified 5-methyl Uridine
  modified_base 16: mod_base = OTHER; note = DNA nucleotide carrying a 6-amino-5-nitro-3-yl-2(1H)-pyridone nucleobase
  modified_base order(2,12,19..20,24): mod_base = OTHER; note = 2-Prime-Fluoro modified nucleoside
  modified_base order(1,3..11,13..14,18,21..23,25..26): mod_base = OTHER; note = 2-Prime-O-Methyl modified nucleoside
  modified_base order(1^2,25^26): mod_base = OTHER; note = (1,3-dimethylimidazolidin-2-ylidene) Phosphoramidate linkage
  modified_base order(2..17,18..25): mod_base = OTHER; note = Phosphorothioate linkage
  modified_base 17^18: mod_base = OTHER; note = Methylphosphonate linkage
  misc_feature 1..26: note = RM115314
tttggcccttcgtctnatggacaaag

SEQ ID NO: 670 - DNA, 29 bp, synthetic construct
  source 1..29: mol_type = other DNA
  misc_feature 21..22: note = DNA
  misc_feature order(1..20,23..29): note = RNA
  modified_base 20: mod_base = OTHER; note = 2-Prime-O-Methoxyethyl modified 5-methyl Uridine
  modified_base 21: mod_base = OTHER; note = DNA nucleotide carrying a 6-amino-5-nitro-3-yl-2(1H)-pyridone nucleobase
  modified_base order(7,17,24..25,29): mod_base = OTHER; note = 2-Prime-Fluoro modified nucleoside
  modified_base order(1..6,8..16,18..19,23,26..28): mod_base = OTHER; note = 2-Prime-O-Methyl modified nucleoside
  modified_base order(1^2,28^29): mod_base = OTHER; note = (1,3-dimethylimidazolidin-2-ylidene) Phosphoramidate linkage
  modified_base order(2..22,23..28): mod_base = OTHER; note = Phosphorothioate linkage
  modified_base 22^23: mod_base = OTHER; note = Methylphosphonate linkage
  misc_feature 1..29: note = RM115315
attaatttggcccttcgtctnatggacaa

SEQ ID NO: 671 - DNA, 29 bp, synthetic construct
  source 1..29: mol_type = other DNA
  misc_feature 18..19: note = DNA
  misc_feature order(1..17,20..29): note = RNA
  modified_base 17: mod_base = OTHER; note = 2-Prime-O-Methoxyethyl modified 5-methyl Uridine
  modified_base 18: mod_base = OTHER; note = DNA nucleotide carrying a 6-amino-5-nitro-3-yl-2(1H)-pyridone nucleobase
  modified_base order(4,14,21..22,26): mod_base = OTHER; note = 2-Prime-Fluoro modified nucleoside
  modified_base order(1..3,5..13,15..16,20,23..25,27..29): mod_base = OTHER; note = 2-Prime-O-Methyl modified nucleoside
  modified_base order(1^2,28^29): mod_base = OTHER; note = (1,3-dimethylimidazolidin-2-ylidene) Phosphoramidate linkage
  modified_base order(2..19,20..28): mod_base = OTHER; note = Phosphorothioate linkage
  modified_base 19^20: mod_base = OTHER; note = Methylphosphonate linkage
  misc_feature 1..29: note = RM115316
aatttggcccttcgtctnatggacaaagt

SEQ ID NO: 672 - DNA, 29 bp, synthetic construct
  source 1..29: mol_type = other DNA
  misc_feature 15..16: note = DNA
  misc_feature order(1..14,17..29): note = RNA
  modified_base 14: mod_base = OTHER; note = 2-Prime-O-Methoxyethyl modified 5-methyl Uridine
  modified_base 15: mod_base = OTHER; note = DNA nucleotide carrying a 6-amino-5-nitro-3-yl-2(1H)-pyridone nucleobase
  modified_base order(1,11,18..19,23): mod_base = OTHER; note = 2-Prime-Fluoro modified nucleoside
  modified_base order(2..10,12..13,17,20..22,24..29): mod_base = OTHER; note = 2-Prime-O-Methyl modified nucleoside
  modified_base order(1^2,28^29): mod_base = OTHER; note = (1,3-dimethylimidazolidin-2-ylidene) Phosphoramidate linkage
  modified_base order(2..16,17..28): mod_base = OTHER; note = Phosphorothioate linkage
  modified_base 16^17: mod_base = OTHER; note = Methylphosphonate linkage
  misc_feature 1..29: note = RM115317
ttggcccttcgtctnatggacaaagtctt

SEQ ID NO: 673 - DNA, 26 bp, synthetic construct
  source 1..26: mol_type = other DNA
  misc_feature 10..11: note = DNA
  misc_feature order(1..9,12..26): note = RNA
  modified_base 9: mod_base = OTHER; note = 2-Prime-O-Methoxyethyl modified 5-methyl Uridine
  modified_base 10: mod_base = OTHER; note = DNA nucleotide carrying a 6-amino-5-nitro-3-yl-2(1H)-pyridone nucleobase
  modified_base order(4,8,13,16,26): mod_base = OTHER; note = 2-Prime-Fluoro modified nucleoside
  modified_base order(1..3,5..7,12,14..15,17..25): mod_base = OTHER; note = 2-Prime-O-Methyl modified nucleoside
  modified_base order(1^2,25^26): mod_base = OTHER; note = (1,3-dimethylimidazolidin-2-ylidene) Phosphoramidate linkage
  modified_base order(2..11,12..25): mod_base = OTHER; note = Phosphorothioate linkage
  modified_base 11^12: mod_base = OTHER; note = Methylphosphonate linkage
  misc_feature 1..26: note = RM115318
ccttcgtctnatggacaaagtcttta

SEQ ID NO: 674 - DNA, 26 bp, synthetic construct
  source 1..26: mol_type = other DNA
  misc_feature 7..8: note = DNA
  misc_feature order(1..6,9..26): note = RNA
  modified_base 6: mod_base = OTHER; note = 2-Prime-O-Methoxyethyl modified 5-methyl Uridine
  modified_base 7: mod_base = OTHER; note = DNA nucleotide carrying a 6-amino-5-nitro-3-yl-2(1H)-pyridone nucleobase
  modified_base order(1,5,10,13,23): mod_base = OTHER; note = 2-Prime-Fluoro modified nucleoside
  modified_base order(2..4,9,11..12,14..22,24..26): mod_base = OTHER; note = 2-Prime-O-Methyl modified nucleoside
  modified_base order(1^2,25^26): mod_base = OTHER; note = (1,3-dimethylimidazolidin-2-ylidene) Phosphoramidate linkage
  modified_base order(2..8,9..25): mod_base = OTHER; note = Phosphorothioate linkage
  modified_base 8^9: mod_base = OTHER; note = Methylphosphonate linkage
  misc_feature 1..26: note = RM115319
tcgtctnatggacaaagtctttaaga

SEQ ID NO: 675 - DNA, 29 bp, synthetic construct
  source 1..29: mol_type = other DNA
  misc_feature 12..13: note = DNA
  misc_feature order(1..11,14..29): note = RNA
  modified_base 11: mod_base = OTHER; note = 2-Prime-O-Methoxyethyl modified 5-methyl Uridine
  modified_base 12: mod_base = OTHER; note = DNA nucleotide carrying a 6-amino-5-nitro-3-yl-2(1H)-pyridone nucleobase
  modified_base order(6,10,15,18,28): mod_base = OTHER; note = 2-Prime-Fluoro modified nucleoside
  modified_base order(1..5,7..9,14,16..17,19..27,29): mod_base = OTHER; note = 2-Prime-O-Methyl modified nucleoside
  modified_base order(1^2,28^29): mod_base = OTHER; note = (1,3-dimethylimidazolidin-2-ylidene) Phosphoramidate linkage
  modified_base order(2..13,14..28): mod_base = OTHER; note = Phosphorothioate linkage
  modified_base 13^14: mod_base = OTHER; note = Methylphosphonate linkage
  misc_feature 1..29: note = RM115320
gcccttcgtctnatggacaaagtctttaa

SEQ ID NO: 676 - DNA, 29 bp, synthetic construct
  source 1..29: mol_type = other DNA
  misc_feature 9..10: note = DNA
  misc_feature order(1..8,11..29): note = RNA
  modified_base 8: mod_base = OTHER; note = 2-Prime-O-Methoxyethyl modified 5-methyl Uridine
  modified_base 9: mod_base = OTHER; note = DNA nucleotide carrying a 6-amino-5-nitro-3-yl-2(1H)-pyridone nucleobase
  modified_base order(3,7,12,15,25): mod_base = OTHER; note = 2-Prime-Fluoro modified nucleoside
  modified_base order(1..2,4..6,11,13..14,16..24,26..29): mod_base = OTHER; note = 2-Prime-O-Methyl modified nucleoside
  modified_base order(1^2,28^29): mod_base = OTHER; note = (1,3-dimethylimidazolidin-2-ylidene) Phosphoramidate linkage
  modified_base order(2..10,11..28): mod_base = OTHER; note = Phosphorothioate linkage
  modified_base 10^11: mod_base = OTHER; note = Methylphosphonate linkage
  misc_feature 1..29: note = RM115321
cttcgtctnatggacaaagtctttaagac

SEQ ID NO: 677 - DNA, 32 bp, synthetic construct; identical to SEQ ID NO: 74
  source 1..32: mol_type = other DNA
  misc_feature 25..26: note = DNA
  misc_feature order(1..24,27..32): note = RNA
  modified_base 24: mod_base = OTHER; note = 2-Prime-O-Methoxyethyl modified 5-methyl Uridine
  modified_base 25: mod_base = OTHER; note = DNA nucleotide carrying a 6-amino-5-nitro-3-yl-2(1H)-pyridone nucleobase
  modified_base order(9,12,21,28,31..32): mod_base = OTHER; note = 2-Prime-Fluoro modified nucleoside
  modified_base order(1..8,10..11,13..20,22..23,27,29..30): mod_base = OTHER; note = 2-Prime-O-Methyl modified nucleoside
  modified_base order(1^2,31^32): mod_base = OTHER; note = (1,3-dimethylimidazolidin-2-ylidene) Phosphoramidate linkage
  modified_base order(2..26,27..31): mod_base = OTHER; note = Phosphorothioate linkage
  modified_base 26^27: mod_base = OTHER; note = Methylphosphonate linkage
  misc_feature 1..32: note = RM115322

SEQ ID NO: 678 - DNA, 32 bp, synthetic construct; identical to SEQ ID NO: 75
  source 1..32: mol_type = other DNA
  misc_feature 22..23: note = DNA
  misc_feature order(1..21,24..32): note = RNA
  modified_base 21: mod_base = OTHER; note = 2-Prime-O-Methoxyethyl modified 5-methyl Uridine
  modified_base 22: mod_base = OTHER; note = DNA nucleotide carrying a 6-amino-5-nitro-3-yl-2(1H)-pyridone nucleobase
  modified_base order(6,9,18,25,28..29): mod_base = OTHER; note = 2-Prime-Fluoro modified nucleoside
  modified_base order(1..5,7..8,10..17,19..20,24,26..27,30..32): mod_base = OTHER; note = 2-Prime-O-Methyl modified nucleoside
  modified_base order(1^2,31^32): mod_base = OTHER; note = (1,3-dimethylimidazolidin-2-ylidene) Phosphoramidate linkage
  modified_base order(2..23,24..31): mod_base = OTHER; note = Phosphorothioate linkage
  modified_base 23^24: mod_base = OTHER; note = Methylphosphonate linkage
  misc_feature 1..32: note = RM115323

SEQ ID NO: 679 - DNA, 32 bp, synthetic construct; identical to SEQ ID NO: 76
  source 1..32: mol_type = other DNA
  misc_feature 19..20: note = DNA
  misc_feature order(1..18,21..32): note = RNA
  modified_base 18: mod_base = OTHER; note = 2-Prime-O-Methoxyethyl modified 5-methyl Uridine
  modified_base 19: mod_base = OTHER; note = DNA nucleotide carrying a 6-amino-5-nitro-3-yl-2(1H)-pyridone nucleobase
  modified_base order(3,6,15,22,25..26): mod_base = OTHER; note = 2-Prime-Fluoro modified nucleoside
  modified_base order(1..2,4..5,7..14,16..17,21,23..24,27..32): mod_base = OTHER; note = 2-Prime-O-Methyl modified nucleoside
  modified_base order(1^2,31^32): mod_base = OTHER; note = (1,3-dimethylimidazolidin-2-ylidene) Phosphoramidate linkage
  modified_base order(2..20,21..31): mod_base = OTHER; note = Phosphorothioate linkage
  modified_base 20^21: mod_base = OTHER; note = Methylphosphonate linkage
  misc_feature 1..32: note = RM115324

SEQ ID NO: 680 - DNA, 32 bp, synthetic construct; identical to SEQ ID NO: 78
  source 1..32: mol_type = other DNA
  misc_feature 13..14: note = DNA
  misc_feature order(1..12,15..32): note = RNA
  modified_base 12: mod_base = OTHER; note = 2-Prime-O-Methoxyethyl modified 5-methyl Uridine
  modified_base 13: mod_base = OTHER; note = DNA nucleotide carrying a 6-amino-5-nitro-3-yl-2(1H)-pyridone nucleobase
  modified_base order(8..9,16,19,28,31): mod_base = OTHER; note = 2-Prime-Fluoro modified nucleoside
  modified_base order(1..7,10..11,15,17..18,20..27,29..30,32): mod_base = OTHER; note = 2-Prime-O-Methyl modified nucleoside
  modified_base order(1^2,31^32): mod_base = OTHER; note = (1,3-dimethylimidazolidin-2-ylidene) Phosphoramidate linkage
  modified_base order(2..14,15..31): mod_base = OTHER; note = Phosphorothioate linkage
  modified_base 14^15: mod_base = OTHER; note = Methylphosphonate linkage
  misc_feature 1..32: note = RM115325

SEQ ID NO: 681 - DNA, 32 bp, synthetic construct; identical to SEQ ID NO: 79
  source 1..32: mol_type = other DNA
  misc_feature 10..11: note = DNA
  misc_feature order(1..9,12..32): note = RNA
  modified_base 9: mod_base = OTHER; note = 2-Prime-O-Methoxyethyl modified 5-methyl Uridine
  modified_base 10: mod_base = OTHER; note = DNA nucleotide carrying a 6-amino-5-nitro-3-yl-2(1H)-pyridone nucleobase
  modified_base order(5..6,13,16,25,28): mod_base = OTHER; note = 2-Prime-Fluoro modified nucleoside
  modified_base order(1..4,7..8,12,14..15,17..24,26..27,29..32): mod_base = OTHER; note = 2-Prime-O-Methyl modified nucleoside
  modified_base order(1^2,31^32): mod_base = OTHER; note = (1,3-dimethylimidazolidin-2-ylidene) Phosphoramidate linkage
  modified_base order(2..11,12..31): mod_base = OTHER; note = Phosphorothioate linkage
  modified_base 11^12: mod_base = OTHER; note = Methylphosphonate linkage
  misc_feature 1..32: note = RM115326

SEQ ID NO: 682 - DNA, 32 bp, synthetic construct; identical to SEQ ID NO: 80
  source 1..32: mol_type = other DNA
  misc_feature 7..8: note = DNA
  misc_feature order(1..6,9..32): note = RNA
  modified_base 6: mod_base = OTHER; note = 2-Prime-O-Methoxyethyl modified 5-methyl Uridine
  modified_base 7: mod_base = OTHER; note = DNA nucleotide carrying a 6-amino-5-nitro-3-yl-2(1H)-pyridone nucleobase
  modified_base order(2..3,10,13,22,25): mod_base = OTHER; note = 2-Prime-Fluoro modified nucleoside
  modified_base order(1,4..5,9,11..12,14..21,23..24,26..32): mod_base = OTHER; note = 2-Prime-O-Methyl modified nucleoside
  modified_base order(1^2,31^32): mod_base = OTHER; note = (1,3-dimethylimidazolidin-2-ylidene) Phosphoramidate linkage
  modified_base order(2..8,9..31): mod_base = OTHER; note = Phosphorothioate linkage
  modified_base 8^9: mod_base = OTHER; note = Methylphosphonate linkage
  misc_feature 1..32: note = RM115327

SEQ ID NO: 683 - DNA, 23 bp, synthetic construct
  source 1..23: mol_type = other DNA
  misc_feature 18..19: note = DNA
  misc_feature order(1..17,20..23): note = RNA
  modified_base 17: mod_base = OTHER; note = 2-Prime-O-Methoxyethyl modified 5-methyl Uridine
  modified_base 18: mod_base = OTHER; note = DNA nucleotide carrying a 6-amino-5-nitro-3-yl-2(1H)-pyridone nucleobase
  modified_base order(2,5,14,21): mod_base = OTHER; note = 2-Prime-Fluoro modified nucleoside
  modified_base order(1,3..4,6..13,15..16,20,22..23): mod_base = OTHER; note = 2-Prime-O-Methyl modified nucleoside
  modified_base order(1^2,22^23): mod_base = OTHER; note = (1,3-dimethylimidazolidin-2-ylidene) Phosphoramidate linkage
  modified_base order(2..19,20..22): mod_base = OTHER; note = Phosphorothioate linkage
  modified_base 19^20: mod_base = OTHER; note = Methylphosphonate linkage
  misc_feature 1..23: note = RM115328
aatttggcccttcgtctnatgga

SEQ ID NO: 684 - DNA, 29 bp, synthetic construct
  source 1..29: mol_type = other DNA
  misc_feature 21..22: note = DNA
  misc_feature order(1..20,23..29): note = RNA
  modified_base 20: mod_base = OTHER; note = 2-Prime-O-Methoxyethyl modified 5-methyl Uridine
  modified_base 21: mod_base = OTHER; note = DNA nucleotide carrying a 6-amino-5-nitro-3-yl-2(1H)-pyridone nucleobase
  modified_base order(3,6..7,10,16,19,24,28): mod_base = OTHER; note = 2-Prime-Fluoro modified nucleoside
  modified_base order(1..2,4..5,8..9,11..15,17..18,23,25..27,29): mod_base = OTHER; note = 2-Prime-O-Methyl modified nucleoside
  modified_base order(1^2,28^29): mod_base = OTHER; note = (1,3-dimethylimidazolidin-2-ylidene) Phosphoramidate linkage
  modified_base order(2..22,23..28): mod_base = OTHER; note = Phosphorothioate linkage
  modified_base 22^23: mod_base = OTHER; note = Methylphosphonate linkage
  misc_feature 1..29: note = RM115329
attaatttggcccttcgtctnatggacaa

SEQ ID NO: 685 - DNA, 29 bp, synthetic construct
  source 1..29: mol_type = other DNA
  misc_feature 9..10: note = DNA
  misc_feature order(1..8,11..29): note = RNA
  modified_base 8: mod_base = OTHER; note = 2-Prime-O-Methoxyethyl modified 5-methyl Uridine
  modified_base 9: mod_base = OTHER; note = DNA nucleotide carrying a 6-amino-5-nitro-3-yl-2(1H)-pyridone nucleobase
  modified_base order(4,12..13,16,22,25..26,29): mod_base = OTHER; note = 2-Prime-Fluoro modified nucleoside
  modified_base order(1..3,5..7,11,14..15,17..21,23..24,27..28): mod_base = OTHER; note = 2-Prime-O-Methyl modified nucleoside
  modified_base order(1^2,28^29): mod_base = OTHER; note = (1,3-dimethylimidazolidin-2-ylidene) Phosphoramidate linkage
  modified_base order(2..10,11..28): mod_base = OTHER; note = Phosphorothioate linkage
  modified_base 10^11: mod_base = OTHER; note = Methylphosphonate linkage
  misc_feature 1..29: note = RM115330
cttcgtctnatggacaaagtctttaagac

SEQ ID NO: 686 - DNA, 29 bp, synthetic construct
  source 1..29: mol_type = other DNA
  misc_feature 6..7: note = DNA
  misc_feature order(1..5,8..29): note = RNA
  modified_base 5: mod_base = OTHER; note = 2-Prime-O-Methoxyethyl modified 5-methyl Uridine
  modified_base 6: mod_base = OTHER; note = DNA nucleotide carrying a 6-amino-5-nitro-3-yl-2(1H)-pyridone nucleobase
  modified_base order(1,9..10,13,19,22..23,26): mod_base = OTHER; note = 2-Prime-Fluoro modified nucleoside
  modified_base order(2..4,8,11..12,14..18,20..21,24..25,27..29): mod_base = OTHER; note = 2-Prime-O-Methyl modified nucleoside
  modified_base order(1^2,28^29): mod_base = OTHER; note = (1,3-dimethylimidazolidin-2-ylidene) Phosphoramidate linkage
  modified_base order(2..7,8..28): mod_base = OTHER; note = Phosphorothioate linkage
  modified_base 7^8: mod_base = OTHER; note = Methylphosphonate linkage
  misc_feature 1..29: note = RM115331
cgtctnatggacaaagtctttaagaccat

SEQ ID NO: 687 - DNA, 26 bp, synthetic construct
  source 1..26: mol_type = other DNA
  misc_feature 19..20: note = DNA
  misc_feature order(1..18,21..26): note = RNA
  modified_base 18: mod_base = OTHER; note = 2-Prime-O-Methoxyethyl modified 5-methyl Uridine
  modified_base 19: mod_base = OTHER; note = DNA nucleotide carrying a 6-amino-5-nitro-3-yl-2(1H)-pyridone nucleobase
  modified_base order(8,14,17,22,26): mod_base = OTHER; note = 2-Prime-Fluoro modified nucleoside
  modified_base order(1..7,9..13,15..16,21,23..25): mod_base = OTHER; note = 2-Prime-O-Methyl modified nucleoside
  modified_base order(1^2,25^26): mod_base = OTHER; note = (1,3-dimethylimidazolidin-2-ylidene) Phosphoramidate linkage
  modified_base order(2..20,21..25): mod_base = OTHER; note = Phosphorothioate linkage
  modified_base 20^21: mod_base = OTHER; note = Methylphosphonate linkage
  misc_feature 1..26: note = RM115332
taatttggcccttcgtctnatggaca

SEQ ID NO: 688 - DNA, 26 bp, synthetic construct
  source 1..26: mol_type = other DNA
  misc_feature 16..17: note = DNA
  misc_feature order(1..15,18..26): note = RNA
  modified_base 15: mod_base = OTHER; note = 2-Prime-O-Methoxyethyl modified 5-methyl Uridine
  modified_base 16: mod_base = OTHER; note = DNA nucleotide carrying a 6-amino-5-nitro-3-yl-2(1H)-pyridone nucleobase
  modified_base order(5,11,14,19,23): mod_base = OTHER; note = 2-Prime-Fluoro modified nucleoside
  modified_base order(1..4,6..10,12..13,18,20..22,24..26): mod_base = OTHER; note = 2-Prime-O-Methyl modified nucleoside
  modified_base order(1^2,25^26): mod_base = OTHER; note = (1,3-dimethylimidazolidin-2-ylidene) Phosphoramidate linkage
  modified_base order(2..17,18..25): mod_base = OTHER; note = Phosphorothioate linkage
  modified_base 17^18: mod_base = OTHER; note = Methylphosphonate linkage
  misc_feature 1..26: note = RM115333
tttggcccttcgtctnatggacaaag

SEQ ID NO: 689 - DNA, 26 bp, synthetic construct
  source 1..26: mol_type = other DNA
  misc_feature 13..14: note = DNA
  misc_feature order(1..12,15..26): note = RNA
  modified_base 12: mod_base = OTHER; note = 2-Prime-O-Methoxyethyl modified 5-methyl Uridine
  modified_base 13: mod_base = OTHER; note = DNA nucleotide carrying a 6-amino-5-nitro-3-yl-2(1H)-pyridone nucleobase
  modified_base order(2,8,11,16,20): mod_base = OTHER; note = 2-Prime-Fluoro modified nucleoside
  modified_base order(1,3..7,9..10,15,17..19,21..26): mod_base = OTHER; note = 2-Prime-O-Methyl modified nucleoside
  modified_base order(1^2,25^26): mod_base = OTHER; note = (1,3-dimethylimidazolidin-2-ylidene) Phosphoramidate linkage
  modified_base order(2..14,15..25): mod_base = OTHER; note = Phosphorothioate linkage
  modified_base 14^15: mod_base = OTHER; note = Methylphosphonate linkage
  misc_feature 1..26: note = RM115334
ggcccttcgtctnatggacaaagtct

SEQ ID NO: 690 - DNA, 29 bp, synthetic construct
  source 1..29: mol_type = other DNA
  misc_feature 21..22: note = DNA
  misc_feature order(1..20,23..29): note = RNA
  modified_base 20: mod_base = OTHER; note = 2-Prime-O-Methoxyethyl modified 5-methyl Uridine
  modified_base 21: mod_base = OTHER; note = DNA nucleotide carrying a 6-amino-5-nitro-3-yl-2(1H)-pyridone nucleobase
  modified_base order(10,16,19,24,28): mod_base = OTHER; note = 2-Prime-Fluoro modified nucleoside
  modified_base order(1..9,11..15,17..18,23,25..27,29): mod_base = OTHER; note = 2-Prime-O-Methyl modified nucleoside
  modified_base order(1^2,28^29): mod_base = OTHER; note = (1,3-dimethylimidazolidin-2-ylidene) Phosphoramidate linkage
  modified_base order(2..22,23..28): mod_base = OTHER; note = Phosphorothioate linkage
  modified_base 22^23: mod_base = OTHER; note = Methylphosphonate linkage
  misc_feature 1..29: note = RM115335
attaatttggcccttcgtctnatggacaa

SEQ ID NO: 691 - DNA, 29 bp, synthetic construct
  source 1..29: mol_type = other DNA
  misc_feature 18..19: note = DNA
  misc_feature order(1..17,20..29): note = RNA
  modified_base 17: mod_base = OTHER; note = 2-Prime-O-Methoxyethyl modified 5-methyl Uridine
  modified_base 18: mod_base = OTHER; note = DNA nucleotide carrying a 6-amino-5-nitro-3-yl-2(1H)-pyridone nucleobase
  modified_base order(7,13,16,21,25): mod_base = OTHER; note = 2-Prime-Fluoro modified nucleoside
  modified_base order(1..6,8..12,14..15,20,22..24,26..29): mod_base = OTHER; note = 2-Prime-O-Methyl modified nucleoside
  modified_base order(1^2,28^29): mod_base = OTHER; note = (1,3-dimethylimidazolidin-2-ylidene) Phosphoramidate linkage
  modified_base order(2..19,20..28): mod_base = OTHER; note = Phosphorothioate linkage
  modified_base 19^20: mod_base = OTHER; note = Methylphosphonate linkage
  misc_feature 1..29: note = RM115336
aatttggcccttcgtctnatggacaaagt

SEQ ID NO: 692 - DNA, 29 bp, synthetic construct
  source 1..29: mol_type = other DNA
  misc_feature 15..16: note = DNA
  misc_feature order(1..14,17..29): note = RNA
  modified_base 14: mod_base = OTHER; note = 2-Prime-O-Methoxyethyl modified 5-methyl Uridine
  modified_base 15: mod_base = OTHER; note = DNA nucleotide carrying a 6-amino-5-nitro-3-yl-2(1H)-pyridone nucleobase
  modified_base order(4,10,13,18,22): mod_base = OTHER; note = 2-Prime-Fluoro modified nucleoside
  modified_base order(1..3,5..9,11..12,17,19..21,23..29): mod_base = OTHER; note = 2-Prime-O-Methyl modified nucleoside
  modified_base order(1^2,28^29): mod_base = OTHER; note = (1,3-dimethylimidazolidin-2-ylidene) Phosphoramidate linkage
  modified_base order(2..16,17..28): mod_base = OTHER; note = Phosphorothioate linkage
  modified_base 16^17: mod_base = OTHER; note = Methylphosphonate linkage
  misc_feature 1..29: note = RM115337
ttggcccttcgtctnatggacaaagtctt

SEQ ID NO: 693 - DNA, 29 bp, synthetic construct
  source 1..29: mol_type = other DNA
  misc_feature 12..13: note = DNA
  misc_feature order(1..11,14..29): note = RNA
  modified_base 11: mod_base = OTHER; note = 2-Prime-O-Methoxyethyl modified 5-methyl Uridine
  modified_base 12: mod_base = OTHER; note = DNA nucleotide carrying a 6-amino-5-nitro-3-yl-2(1H)-pyridone nucleobase
  modified_base order(1,7,10,15,19): mod_base = OTHER; note = 2-Prime-Fluoro modified nucleoside
  modified_base order(2..6,8..9,14,16..18,20..29): mod_base = OTHER; note = 2-Prime-O-Methyl modified nucleoside
  modified_base order(1^2,28^29): mod_base = OTHER; note = (1,3-dimethylimidazolidin-2-ylidene) Phosphoramidate linkage
  modified_base order(2..13,14..28): mod_base = OTHER; note = Phosphorothioate linkage
  modified_base 13^14: mod_base = OTHER; note = Methylphosphonate linkage
  misc_feature 1..29: note = RM115338
gcccttcgtctnatggacaaagtctttaa

SEQ ID NO: 694 - DNA, 26 bp, synthetic construct
  source 1..26: mol_type = other DNA
  misc_feature 13..14: note = DNA
  misc_feature order(1..12,15..26): note = RNA
  modified_base 12: mod_base = OTHER; note = 2-Prime-O-Methoxyethyl modified 5-methyl Uridine
  modified_base 13: mod_base = OTHER; note = DNA nucleotide carrying a 6-amino-5-nitro-3-yl-2(1H)-pyridone nucleobase
  modified_base order(8,16..17,20,26): mod_base = OTHER; note = 2-Prime-Fluoro modified nucleoside
  modified_base order(1..7,9..11,15,18..19,21..25): mod_base = OTHER; note = 2-Prime-O-Methyl modified nucleoside
  modified_base order(1^2,25^26): mod_base = OTHER; note = (1,3-dimethylimidazolidin-2-ylidene) Phosphoramidate linkage
  modified_base order(2..14,15..25): mod_base = OTHER; note = Phosphorothioate linkage
  modified_base 14^15: mod_base = OTHER; note = Methylphosphonate linkage
  misc_feature 1..26: note = RM115339
ggcccttcgtctnatggacaaagtct

SEQ ID NO: 695 - DNA, 26 bp, synthetic construct
  source 1..26: mol_type = other DNA
  misc_feature 10..11: note = DNA
  misc_feature order(1..9,12..26): note = RNA
  modified_base 9: mod_base = OTHER; note = 2-Prime-O-Methoxyethyl modified 5-methyl Uridine
  modified_base 10: mod_base = OTHER; note = DNA nucleotide carrying a 6-amino-5-nitro-3-yl-2(1H)-pyridone nucleobase
  modified_base order(5,13..14,17,23): mod_base = OTHER; note = 2-Prime-Fluoro modified nucleoside
  modified_base order(1..4,6..8,12,15..16,18..22,24..26): mod_base = OTHER; note = 2-Prime-O-Methyl modified nucleoside
  modified_base order(1^2,25^26): mod_base = OTHER; note = (1,3-dimethylimidazolidin-2-ylidene) Phosphoramidate linkage
  modified_base order(2..11,12..25): mod_base = OTHER; note = Phosphorothioate linkage
  modified_base 11^12: mod_base = OTHER; note = Methylphosphonate linkage
  misc_feature 1..26: note = RM115340
ccttcgtctnatggacaaagtcttta

SEQ ID NO: 696 - DNA, 26 bp, synthetic construct
  source 1..26: mol_type = other DNA
  misc_feature 7..8: note = DNA
  misc_feature order(1..6,9..26): note = RNA
  modified_base 6: mod_base = OTHER; note = 2-Prime-O-Methoxyethyl modified 5-methyl Uridine
  modified_base 7: mod_base = OTHER; note = DNA nucleotide carrying a 6-amino-5-nitro-3-yl-2(1H)-pyridone nucleobase
  modified_base order(2,10..11,14,20): mod_base = OTHER; note = 2-Prime-Fluoro modified nucleoside
  modified_base order(1,3..5,9,12..13,15..19,21..26): mod_base = OTHER; note = 2-Prime-O-Methyl modified nucleoside
  modified_base order(1^2,25^26): mod_base = OTHER; note = (1,3-dimethylimidazolidin-2-ylidene) Phosphoramidate linkage
  modified_base order(2..8,9..25): mod_base = OTHER; note = Phosphorothioate linkage
  modified_base 8^9: mod_base = OTHER; note = Methylphosphonate linkage
  misc_feature 1..26: note = RM115341
tcgtctnatggacaaagtctttaaga

SEQ ID NO: 697 - DNA, 29 bp, synthetic construct
  source 1..29: mol_type = other DNA
  misc_feature 15..16: note = DNA
  misc_feature order(1..14,17..29): note = RNA
  modified_base 14: mod_base = OTHER; note = 2-Prime-O-Methoxyethyl modified 5-methyl Uridine
  modified_base 15: mod_base = OTHER; note = DNA nucleotide carrying a 6-amino-5-nitro-3-yl-2(1H)-pyridone nucleobase
  modified_base order(10,18..19,22,28): mod_base = OTHER; note = 2-Prime-Fluoro modified nucleoside
  modified_base order(1..9,11..13,17,20..21,23..27,29): mod_base = OTHER; note = 2-Prime-O-Methyl modified nucleoside
  modified_base order(1^2,28^29): mod_base = OTHER; note = (1,3-dimethylimidazolidin-2-ylidene) Phosphoramidate linkage
  modified_base order(2..16,17..28): mod_base = OTHER; note = Phosphorothioate linkage
  modified_base 16^17: mod_base = OTHER; note = Methylphosphonate linkage
  misc_feature 1..29: note = RM115342
ttggcccttcgtctnatggacaaagtctt

SEQ ID NO: 698 - DNA, 29 bp, synthetic construct
  source 1..29: mol_type = other DNA
  misc_feature 12..13: note = DNA
  misc_feature order(1..11,14..29): note = RNA
  modified_base 11: mod_base = OTHER; note = 2-Prime-O-Methoxyethyl modified 5-methyl Uridine
  modified_base 12: mod_base = OTHER; note = DNA nucleotide carrying a 6-amino-5-nitro-3-yl-2(1H)-pyridone nucleobase
  modified_base order(7,15..16,19,25): mod_base = OTHER; note = 2-Prime-Fluoro modified nucleoside
  modified_base order(1..6,8..10,14,17..18,20..24,26..29): mod_base = OTHER; note = 2-Prime-O-Methyl modified nucleoside
  modified_base order(1^2,28^29): mod_base = OTHER; note = (1,3-dimethylimidazolidin-2-ylidene) Phosphoramidate linkage
  modified_base order(2..13,14..28): mod_base = OTHER; note = Phosphorothioate linkage
  modified_base 13^14: mod_base = OTHER; note = Methylphosphonate linkage
  misc_feature 1..29: note = RM115343
gcccttcgtctnatggacaaagtctttaa

SEQ ID NO: 699 - DNA, 29 bp, synthetic construct
  source 1..29: mol_type = other DNA
  misc_feature 9..10: note = DNA
  misc_feature order(1..8,11..29): note = RNA
  modified_base 8: mod_base = OTHER; note = 2-Prime-O-Methoxyethyl modified 5-methyl Uridine
  modified_base 9: mod_base = OTHER; note = DNA nucleotide carrying a 6-amino-5-nitro-3-yl-2(1H)-pyridone nucleobase
  modified_base order(4,12..13,16,22): mod_base = OTHER; note = 2-Prime-Fluoro modified nucleoside
  modified_base order(1..3,5..7,11,14..15,17..21,23..29): mod_base = OTHER; note = 2-Prime-O-Methyl modified nucleoside
  modified_base order(1^2,28^29): mod_base = OTHER; note = (1,3-dimethylimidazolidin-2-ylidene) Phosphoramidate linkage
  modified_base order(2..10,11..28): mod_base = OTHER; note = Phosphorothioate linkage
  modified_base 10^11: mod_base = OTHER; note = Methylphosphonate linkage
  misc_feature 1..29: note = RM115344
cttcgtctnatggacaaagtctttaagac

SEQ ID NO: 700 - DNA, 29 bp, synthetic construct
  source 1..29: mol_type = other DNA
  misc_feature 6..7: note = DNA
  misc_feature order(1..5,8..29): note = RNA
  modified_base 5: mod_base = OTHER; note = 2-Prime-O-Methoxyethyl modified 5-methyl Uridine
  modified_base 6: mod_base = OTHER; note = DNA nucleotide carrying a 6-amino-5-nitro-3-yl-2(1H)-pyridone nucleobase
  modified_base order(1,9..10,13,19): mod_base = OTHER; note = 2-Prime-Fluoro modified nucleoside
  modified_base order(2..4,8,11..12,14..18,20..29): mod_base = OTHER; note = 2-Prime-O-Methyl modified nucleoside
  modified_base order(1^2,28^29): mod_base = OTHER; note = (1,3-dimethylimidazolidin-2-ylidene) Phosphoramidate linkage
  modified_base order(2..7,8..28): mod_base = OTHER; note = Phosphorothioate linkage
  modified_base 7^8: mod_base = OTHER; note = Methylphosphonate linkage
  misc_feature 1..29: note = RM115345
cgtctnatggacaaagtctttaagaccat

SEQ ID NO: 701 - DNA, 26 bp, synthetic construct
  source 1..26: mol_type = other DNA
  misc_feature 22..23: note = DNA
  misc_feature order(1..21,24..26): note = RNA
  modified_base 21: mod_base = OTHER; note = 2-Prime-O-Methoxyethyl modified 5-methyl Uridine
  modified_base 22: mod_base = OTHER; note = DNA nucleotide carrying a 6-amino-5-nitro-3-yl-2(1H)-pyridone nucleobase
  modified_base order(5,7,13,16,18..19,25): mod_base = OTHER; note = 2-Prime-Fluoro modified nucleoside
  modified_base order(1..4,6,8..12,14..15,17,20,24,26): mod_base = OTHER; note = 2-Prime-O-Methyl modified nucleoside
  modified_base order(1^2,25^26): mod_base = OTHER; note = (1,3-dimethylimidazolidin-2-ylidene) Phosphoramidate linkage
  modified_base order(2..23,24^25): mod_base = OTHER; note = Phosphorothioate linkage
  modified_base 23^24: mod_base = OTHER; note = Methylphosphonate linkage
  misc_feature 1..26: note = RM115346
cattaatttggcccttcgtctnatgg

SEQ ID NO: 702 - DNA, 26 bp, synthetic construct
  source 1..26: mol_type = other DNA
  misc_feature 19..20: note = DNA
  misc_feature order(1..18,21..26): note = RNA
  modified_base 18: mod_base = OTHER; note = 2-Prime-O-Methoxyethyl modified 5-methyl Uridine
  modified_base 19: mod_base = OTHER; note = DNA nucleotide carrying a 6-amino-5-nitro-3-yl-2(1H)-pyridone nucleobase
  modified_base order(2,4,10,13,15..16,22): mod_base = OTHER; note = 2-Prime-Fluoro modified nucleoside
  modified_base order(1,3,5..9,11..12,14,17,21,23..26): mod_base = OTHER; note = 2-Prime-O-Methyl modified nucleoside
  modified_base order(1^2,25^26): mod_base = OTHER; note = (1,3-dimethylimidazolidin-2-ylidene) Phosphoramidate linkage
  modified_base order(2..20,21..25): mod_base = OTHER; note = Phosphorothioate linkage
  modified_base 20^21: mod_base = OTHER; note = Methylphosphonate linkage
  misc_feature 1..26: note = RM115347
taatttggcccttcgtctnatggaca

SEQ ID NO: 703 - DNA, 26 bp, synthetic construct
  source 1..26: mol_type = other DNA
  misc_feature 22..23: note = DNA
  misc_feature order(1..21,24..26): note = RNA
  modified_base 21: mod_base = OTHER; note = 2-Prime-O-Methoxyethyl modified 5-methyl Uridine
  modified_base 22: mod_base = OTHER; note = DNA nucleotide carrying a 6-amino-5-nitro-3-yl-2(1H)-pyridone nucleobase
  modified_base order(13,16,18..19,25): mod_base = OTHER; note = 2-Prime-Fluoro modified nucleoside
  modified_base order(1..12,14..15,17,20,24,26): mod_base = OTHER; note = 2-Prime-O-Methyl modified nucleoside
  modified_base order(1^2,25^26): mod_base = OTHER; note = (1,3-dimethylimidazolidin-2-ylidene) Phosphoramidate linkage
  modified_base order(2..23,24^25): mod_base = OTHER; note = Phosphorothioate linkage
  modified_base 23^24: mod_base = OTHER; note = Methylphosphonate linkage
  misc_feature 1..26: note = RM115348
cattaatttggcccttcgtctnatgg

SEQ ID NO: 704 - DNA, 26 bp, synthetic construct
  source 1..26: mol_type = other DNA
  misc_feature 19..20: note = DNA
  misc_feature order(1..18,21..26): note = RNA
  modified_base 18: mod_base = OTHER; note = 2-Prime-O-Methoxyethyl modified 5-methyl Uridine
  modified_base 19: mod_base = OTHER; note = DNA nucleotide carrying a 6-amino-5-nitro-3-yl-2(1H)-pyridone nucleobase
  modified_base order(10,13,15..16,22): mod_base = OTHER; note = 2-Prime-Fluoro modified nucleoside
  modified_base order(1..9,11..12,14,17,21,23..26): mod_base = OTHER; note = 2-Prime-O-Methyl modified nucleoside
  modified_base order(1^2,25^26): mod_base = OTHER; note = (1,3-dimethylimidazolidin-2-ylidene) Phosphoramidate linkage
  modified_base order(2..20,21..25): mod_base = OTHER; note = Phosphorothioate linkage
  modified_base 20^21: mod_base = OTHER; note = Methylphosphonate linkage
  misc_feature 1..26: note = RM115349
taatttggcccttcgtctnatggaca

SEQ ID NO: 705 - DNA, 26 bp, synthetic construct
  source 1..26: mol_type = other DNA
  misc_feature 16..17: note = DNA
  misc_feature order(1..15,18..26): note = RNA
  modified_base 15: mod_base = OTHER; note = 2-Prime-O-Methoxyethyl modified 5-methyl Uridine
  modified_base 16: mod_base = OTHER; note = DNA nucleotide carrying a 6-amino-5-nitro-3-yl-2(1H)-pyridone nucleobase
  modified_base order(7,10,12..13,19): mod_base = OTHER; note = 2-Prime-Fluoro modified nucleoside
  modified_base order(1..6,8..9,11,14,18,20..26): mod_base = OTHER; note = 2-Prime-O-Methyl modified nucleoside
  modified_base order(1^2,25^26): mod_base = OTHER; note = (1,3-dimethylimidazolidin-2-ylidene) Phosphoramidate linkage
  modified_base order(2..17,18..25): mod_base = OTHER; note = Phosphorothioate linkage
  modified_base 17^18: mod_base = OTHER; note = Methylphosphonate linkage
  misc_feature 1..26: note = RM115350
tttggcccttcgtctnatggacaaag

SEQ ID NO: 706 - DNA, 26 bp, synthetic construct
  source 1..26: mol_type = other DNA
  misc_feature 13..14: note = DNA
  misc_feature order(1..12,15..26): note = RNA
  modified_base 12: mod_base = OTHER; note = 2-Prime-O-Methoxyethyl modified 5-methyl Uridine
  modified_base 13: mod_base = OTHER; note = DNA nucleotide carrying a 6-amino-5-nitro-3-yl-2(1H)-pyridone nucleobase
  modified_base order(4,7,9..10,16): mod_base = OTHER; note = 2-Prime-Fluoro modified nucleoside
  modified_base order(1..3,5..6,8,11,15,17..26): mod_base = OTHER; note = 2-Prime-O-Methyl modified nucleoside
  modified_base order(1^2,25^26): mod_base = OTHER; note = (1,3-dimethylimidazolidin-2-ylidene) Phosphoramidate linkage
  modified_base order(2..14,15..25): mod_base = OTHER; note = Phosphorothioate linkage
  modified_base 14^15: mod_base = OTHER; note = Methylphosphonate linkage
  misc_feature 1..26: note = RM115351
ggcccttcgtctnatggacaaagtct

SEQ ID NO: 707 - DNA, 26 bp, synthetic construct
  source 1..26: mol_type = other DNA
  misc_feature 10..11: note = DNA
  misc_feature order(1..9,12..26): note = RNA
  modified_base 9: mod_base = OTHER; note = 2-Prime-O-Methoxyethyl modified 5-methyl Uridine
  modified_base 10: mod_base = OTHER; note = DNA nucleotide carrying a 6-amino-5-nitro-3-yl-2(1H)-pyridone nucleobase
  modified_base order(1,4,6..7,13): mod_base = OTHER; note = 2-Prime-Fluoro modified nucleoside
  modified_base order(2..3,5,8,12,14..26): mod_base = OTHER; note = 2-Prime-O-Methyl modified nucleoside
  modified_base order(1^2,25^26): mod_base = OTHER; note = (1,3-dimethylimidazolidin-2-ylidene) Phosphoramidate linkage
  modified_base order(2..11,12..25): mod_base = OTHER; note = Phosphorothioate linkage
  modified_base 11^12: mod_base = OTHER; note = Methylphosphonate linkage
  misc_feature 1..26: note = RM115352
ccttcgtctnatggacaaagtcttta

SEQ ID NO: 708 - DNA, 29 bp, synthetic construct
  source 1..29: mol_type = other DNA
  misc_feature 24..25: note = DNA
  misc_feature order(1..23,26..29): note = RNA
  modified_base 23: mod_base = OTHER; note = 2-Prime-O-Methoxyethyl modified 5-methyl Uridine
  modified_base 24: mod_base = OTHER; note = DNA nucleotide carrying a 6-amino-5-nitro-3-yl-2(1H)-pyridone nucleobase
  modified_base order(15,18,20..21,27): mod_base = OTHER; note = 2-Prime-Fluoro modified nucleoside
  modified_base order(1..14,16..17,19,22,26,28..29): mod_base = OTHER; note = 2-Prime-O-Methyl modified nucleoside
  modified_base order(1^2,28^29): mod_base = OTHER; note = (1,3-dimethylimidazolidin-2-ylidene) Phosphoramidate linkage
  modified_base order(2..25,26..28): mod_base = OTHER; note = Phosphorothioate linkage
  modified_base 25^26: mod_base = OTHER; note = Methylphosphonate linkage
  misc_feature 1..29: note = RM115353
gtcattaatttggcccttcgtctnatgga

SEQ ID NO: 709 - DNA, 29 bp, synthetic construct
  source 1..29: mol_type = other DNA
  misc_feature 21..22: note = DNA
  misc_feature order(1..20,23..29): note = RNA
  modified_base 20: mod_base = OTHER; note = 2-Prime-O-Methoxyethyl modified 5-methyl Uridine
  modified_base 21: mod_base = OTHER; note = DNA nucleotide carrying a 6-amino-5-nitro-3-yl-2(1H)-pyridone nucleobase
  modified_base order(12,15,17..18,24): mod_base = OTHER; note = 2-Prime-Fluoro modified nucleoside
  modified_base order(1..11,13..14,16,19,23,25..29): mod_base = OTHER; note = 2-Prime-O-Methyl modified nucleoside
  modified_base order(1^2,28^29): mod_base = OTHER; note = (1,3-dimethylimidazolidin-2-ylidene) Phosphoramidate linkage
  modified_base order(2..22,23..28): mod_base = OTHER; note = Phosphorothioate linkage
  modified_base 22^23: mod_base = OTHER; note = Methylphosphonate linkage
  misc_feature 1..29: note = RM115354
attaatttggcccttcgtctnatggacaa

SEQ ID NO: 710 - DNA, 29 bp, synthetic construct
  source 1..29: mol_type = other DNA
  misc_feature 18..19: note = DNA
  misc_feature order(1..17,20..29): note = RNA
  modified_base 17: mod_base = OTHER; note = 2-Prime-O-Methoxyethyl modified 5-methyl Uridine
  modified_base 18: mod_base = OTHER; note = DNA nucleotide carrying a 6-amino-5-nitro-3-yl-2(1H)-pyridone nucleobase
  modified_base order(9,12,14..15,21): mod_base = OTHER; note = 2-Prime-Fluoro modified nucleoside
  modified_base order(1..8,10..11,13,16,20,22..29): mod_base = OTHER; note = 2-Prime-O-Methyl modified nucleoside
  modified_base order(1^2,28^29): mod_base = OTHER; note = (1,3-dimethylimidazolidin-2-ylidene) Phosphoramidate linkage
  modified_base order(2..19,20..28): mod_base = OTHER; note = Phosphorothioate linkage
  modified_base 19^20: mod_base = OTHER; note = Methylphosphonate linkage
  misc_feature 1..29: note = RM115355
aatttggcccttcgtctnatggacaaagt

SEQ ID NO: 711 - DNA, 29 bp, synthetic construct
  source 1..29: mol_type = other DNA
  misc_feature 15..16: note = DNA
  misc_feature order(1..14,17..29): note = RNA
  modified_base 14: mod_base = OTHER; note = 2-Prime-O-Methoxyethyl modified 5-methyl Uridine
  modified_base 15: mod_base = OTHER; note = DNA nucleotide carrying a 6-amino-5-nitro-3-yl-2(1H)-pyridone nucleobase
  modified_base order(6,9,11..12,18): mod_base = OTHER; note = 2-Prime-Fluoro modified nucleoside
  modified_base order(1..5,7..8,10,13,17,19..29): mod_base = OTHER; note = 2-Prime-O-Methyl modified nucleoside
  modified_base order(1^2,28^29): mod_base = OTHER; note = (1,3-dimethylimidazolidin-2-ylidene) Phosphoramidate linkage
  modified_base order(2..16,17..28): mod_base = OTHER; note = Phosphorothioate linkage
  modified_base 16^17: mod_base = OTHER; note = Methylphosphonate linkage
  misc_feature 1..29: note = RM115356
ttggcccttcgtctnatggacaaagtctt

SEQ ID NO: 712 - DNA, 29 bp, synthetic construct
  source 1..29: mol_type = other DNA
  misc_feature 12..13: note = DNA
  misc_feature order(1..11,14..29): note = RNA
  modified_base 11: mod_base = OTHER; note = 2-Prime-O-Methoxyethyl modified 5-methyl Uridine
  modified_base 12: mod_base = OTHER; note = DNA nucleotide carrying a 6-amino-5-nitro-3-yl-2(1H)-pyridone nucleobase
  modified_base order(3,6,8..9,15): mod_base = OTHER; note = 2-Prime-Fluoro modified nucleoside
  modified_base order(1..2,4..5,7,10,14,16..29): mod_base = OTHER; note = 2-Prime-O-Methyl modified nucleoside
  modified_base order(1^2,28^29): mod_base = OTHER; note = (1,3-dimethylimidazolidin-2-ylidene) Phosphoramidate linkage
  modified_base order(2..13,14..28): mod_base = OTHER; note = Phosphorothioate linkage
  modified_base 13^14: mod_base = OTHER; note = Methylphosphonate linkage
  misc_feature 1..29: note = RM115357
gcccttcgtctnatggacaaagtctttaa

SEQ ID NO: 713 - DNA, 26 bp, synthetic construct
  source 1..26: mol_type = other DNA
  misc_feature 22..23: note = DNA
  misc_feature order(1..21,24..26): note = RNA
  modified_base 21: mod_base = OTHER; note = 2-Prime-O-Methoxyethyl modified 5-methyl Uridine
  modified_base 22: mod_base = OTHER; note = DNA nucleotide carrying a 6-amino-5-nitro-3-yl-2(1H)-pyridone nucleobase
  modified_base order(3..4,8..9,12..13,25): mod_base = OTHER; note = 2-Prime-Fluoro modified nucleoside
  modified_base order(1..2,5..7,10..11,14..20,24,26): mod_base = OTHER; note = 2-Prime-O-Methyl modified nucleoside
  modified_base order(1^2,25^26): mod_base = OTHER; note = (1,3-dimethylimidazolidin-2-ylidene) Phosphoramidate linkage
  modified_base order(2..23,24^25): mod_base = OTHER; note = Phosphorothioate linkage
  modified_base 23^24: mod_base = OTHER; note = Methylphosphonate linkage
  misc_feature 1..26: note = RM115358
cattaatttggcccttcgtctnatgg

SEQ ID NO: 714 - DNA, 26 bp, synthetic construct
  source 1..26: mol_type = other DNA
  misc_feature 22..23: note = DNA
  misc_feature order(1..21,24..26): note = RNA
  modified_base 21: mod_base = OTHER; note = 2-Prime-O-Methoxyethyl modified 5-methyl Uridine
  modified_base 22: mod_base = OTHER; note = DNA nucleotide carrying a 6-amino-5-nitro-3-yl-2(1H)-pyridone nucleobase
  modified_base order(8..9,12..13,25): mod_base = OTHER; note = 2-Prime-Fluoro modified nucleoside
  modified_base order(1..7,10..11,14..20,24,26): mod_base = OTHER; note = 2-Prime-O-Methyl modified nucleoside
  modified_base order(1^2,25^26): mod_base = OTHER; note = (1,3-dimethylimidazolidin-2-ylidene) Phosphoramidate linkage
  modified_base order(2..23,24^25): mod_base = OTHER; note = Phosphorothioate linkage
  modified_base 23^24: mod_base = OTHER; note = Methylphosphonate linkage
  misc_feature 1..26: note = RM115359
cattaatttggcccttcgtctnatgg

SEQ ID NO: 715 - DNA, 26 bp, synthetic construct
  source 1..26: mol_type = other DNA
  misc_feature 19..20: note = DNA
  misc_feature order(1..18,21..26): note = RNA
  modified_base 18: mod_base = OTHER; note = 2-Prime-O-Methoxyethyl modified 5-methyl Uridine
  modified_base 19: mod_base = OTHER; note = DNA nucleotide carrying a 6-amino-5-nitro-3-yl-2(1H)-pyridone nucleobase
  modified_base order(5..6,9..10,22): mod_base = OTHER; note = 2-Prime-Fluoro modified nucleoside
  modified_base order(1..4,7..8,11..17,21,23..26): mod_base = OTHER; note = 2-Prime-O-Methyl modified nucleoside
  modified_base order(1^2,25^26): mod_base = OTHER; note = (1,3-dimethylimidazolidin-2-ylidene) Phosphoramidate linkage
  modified_base order(2..20,21..25): mod_base = OTHER; note = Phosphorothioate linkage
  modified_base 20^21: mod_base = OTHER; note = Methylphosphonate linkage
  misc_feature 1..26: note = RM115360
taatttggcccttcgtctnatggaca

SEQ ID NO: 716 - DNA, 26 bp, synthetic construct
  source 1..26: mol_type = other DNA
  misc_feature 16..17: note = DNA
  misc_feature order(1..15,18..26): note = RNA
  modified_base 15: mod_base = OTHER; note = 2-Prime-O-Methoxyethyl modified 5-methyl Uridine
  modified_base 16: mod_base = OTHER; note = DNA nucleotide carrying a 6-amino-5-nitro-3-yl-2(1H)-pyridone nucleobase
  modified_base order(2..3,6..7,19): mod_base = OTHER; note = 2-Prime-Fluoro modified nucleoside
  modified_base order(1,4..5,8..14,18,20..26): mod_base = OTHER; note = 2-Prime-O-Methyl modified nucleoside
  modified_base order(1^2,25^26): mod_base = OTHER; note = (1,3-dimethylimidazolidin-2-ylidene) Phosphoramidate linkage
  modified_base order(2..17,18..25): mod_base = OTHER; note = Phosphorothioate linkage
  modified_base 17^18: mod_base = OTHER; note = Methylphosphonate linkage
  misc_feature 1..26: note = RM115361
tttggcccttcgtctnatggacaaag

SEQ ID NO: 717 - DNA, 29 bp, synthetic construct
  source 1..29: mol_type = other DNA
  misc_feature 24..25: note = DNA
  misc_feature order(1..23,26..29): note = RNA
  modified_base 23: mod_base = OTHER; note = 2-Prime-O-Methoxyethyl modified 5-methyl Uridine
  modified_base 24: mod_base = OTHER; note = DNA nucleotide carrying a 6-amino-5-nitro-3-yl-2(1H)-pyridone nucleobase
  modified_base order(10..11,14..15,27): mod_base = OTHER; note = 2-Prime-Fluoro modified nucleoside
  modified_base order(1..9,12..13,16..22,26,28..29): mod_base = OTHER; note = 2-Prime-O-Methyl modified nucleoside
  modified_base order(1^2,28^29): mod_base = OTHER; note = (1,3-dimethylimidazolidin-2-ylidene) Phosphoramidate linkage
  modified_base order(2..25,26..28): mod_base = OTHER; note = Phosphorothioate linkage
  modified_base 25^26: mod_base = OTHER; note = Methylphosphonate linkage
  misc_feature 1..29: note = RM115362
gtcattaatttggcccttcgtctnatgga

SEQ ID NO: 718 - DNA, 29 bp, synthetic construct
  source 1..29: mol_type = other DNA
  misc_feature 21..22: note = DNA
  misc_feature order(1..20,23..29): note = RNA
  modified_base 20: mod_base = OTHER; note = 2-Prime-O-Methoxyethyl modified 5-methyl Uridine
  modified_base 21: mod_base = OTHER; note = DNA nucleotide carrying a 6-amino-5-nitro-3-yl-2(1H)-pyridone nucleobase
  modified_base order(7..8,11..12,24): mod_base = OTHER; note = 2-Prime-Fluoro modified nucleoside
  modified_base order(1..6,9..10,13..19,23,25..29): mod_base = OTHER; note = 2-Prime-O-Methyl modified nucleoside
  modified_base order(1^2,28^29): mod_base = OTHER; note = (1,3-dimethylimidazolidin-2-ylidene) Phosphoramidate linkage
  modified_base order(2..22,23..28): mod_base = OTHER; note = Phosphorothioate linkage
  modified_base 22^23: mod_base = OTHER; note = Methylphosphonate linkage
  misc_feature 1..29: note = RM115363
attaatttggcccttcgtctnatggacaa

SEQ ID NO: 719 - DNA, 29 bp, synthetic construct
  source 1..29: mol_type = other DNA
  misc_feature 18..19: note = DNA
  misc_feature order(1..17,20..29): note = RNA
  modified_base 17: mod_base = OTHER; note = 2-Prime-O-Methoxyethyl modified 5-methyl Uridine
  modified_base 18: mod_base = OTHER; note = DNA nucleotide carrying a 6-amino-5-nitro-3-yl-2(1H)-pyridone nucleobase
  modified_base order(4..5,8..9,21): mod_base = OTHER; note = 2-Prime-Fluoro modified nucleoside
  modified_base order(1..3,6..7,10..16,20,22..29): mod_base = OTHER; note = 2-Prime-O-Methyl modified nucleoside
  modified_base order(1^2,28^29): mod_base = OTHER; note = (1,3-dimethylimidazolidin-2-ylidene) Phosphoramidate linkage
  modified_base order(2..19,20..28): mod_base = OTHER; note = Phosphorothioate linkage
  modified_base 19^20: mod_base = OTHER; note = Methylphosphonate linkage
  misc_feature 1..29: note = RM115364
aatttggcccttcgtctnatggacaaagt

SEQ ID NO: 720 - DNA, 29 bp, synthetic construct
  source 1..29: mol_type = other DNA
  misc_feature 15..16: note = DNA
  misc_feature order(1..14,17..29): note = RNA
  modified_base 14: mod_base = OTHER; note = 2-Prime-O-Methoxyethyl modified 5-methyl Uridine
  modified_base 15: mod_base = OTHER; note = DNA nucleotide carrying a 6-amino-5-nitro-3-yl-2(1H)-pyridone nucleobase
  modified_base order(1..2,5..6,18): mod_base = OTHER; note = 2-Prime-Fluoro modified nucleoside
  modified_base order(3..4,7..13,17,19..29): mod_base = OTHER; note = 2-Prime-O-Methyl modified nucleoside
  modified_base order(1^2,28^29): mod_base = OTHER; note = (1,3-dimethylimidazolidin-2-ylidene) Phosphoramidate linkage
  modified_base order(2..16,17..28): mod_base = OTHER; note = Phosphorothioate linkage
  modified_base 16^17: mod_base = OTHER; note = Methylphosphonate linkage
  misc_feature 1..29: note = RM115365
ttggcccttcgtctnatggacaaagtctt

SEQ ID NO: 721 - DNA, 23 bp, synthetic construct
  source 1..23: mol_type = other DNA
  misc_feature 18..19: note = DNA
  misc_feature order(1..17,20..23): note = RNA
  modified_base 17: mod_base = OTHER; note = 2-Prime-O-Methoxyethyl modified 5-methyl Uridine
  modified_base 18: mod_base = OTHER; note = DNA nucleotide carrying a 6-amino-5-nitro-3-yl-2(1H)-pyridone nucleobase
  modified_base order(9,21): mod_base = OTHER; note = 2-Prime-Fluoro modified nucleoside
  modified_base order(1..8,10..16,20,22..23): mod_base = OTHER; note = 2-Prime-O-Methyl modified nucleoside
  modified_base order(1^2,22^23): mod_base = OTHER; note = (1,3-dimethylimidazolidin-2-ylidene) Phosphoramidate linkage
  modified_base order(2..19,20..22): mod_base = OTHER; note = Phosphorothioate linkage
  modified_base 19^20: mod_base = OTHER; note = Methylphosphonate linkage
  misc_feature 1..23: note = RM115366
aatttggcccttcgtctnatgga

SEQ ID NO: 722 - DNA, 23 bp, synthetic construct
  source 1..23: mol_type = other DNA
  misc_feature 15..16: note = DNA
  misc_feature order(1..14,17..23): note = RNA
  modified_base 14: mod_base = OTHER; note = 2-Prime-O-Methoxyethyl modified 5-methyl Uridine
  modified_base 15: mod_base = OTHER; note = DNA nucleotide carrying a 6-amino-5-nitro-3-yl-2(1H)-pyridone nucleobase
  modified_base order(6,18): mod_base = OTHER; note = 2-Prime-Fluoro modified nucleoside
  modified_base order(1..5,7..13,17,19..23): mod_base = OTHER; note = 2-Prime-O-Methyl modified nucleoside
  modified_base order(1^2,22^23): mod_base = OTHER; note = (1,3-dimethylimidazolidin-2-ylidene) Phosphoramidate linkage
  modified_base order(2..16,17..22): mod_base = OTHER; note = Phosphorothioate linkage
  modified_base 16^17: mod_base = OTHER; note = Methylphosphonate linkage
  misc_feature 1..23: note = RM115367
ttggcccttcgtctnatggacaa

SEQ ID NO: 723 - DNA, 23 bp, synthetic construct
  source 1..23: mol_type = other DNA
  misc_feature 12..13: note = DNA
  misc_feature order(1..11,14..23): note = RNA
  modified_base 11: mod_base = OTHER; note = 2-Prime-O-Methoxyethyl modified 5-methyl Uridine
  modified_base 12: mod_base = OTHER; note = DNA nucleotide carrying a 6-amino-5-nitro-3-yl-2(1H)-pyridone nucleobase
  modified_base order(3,15): mod_base = OTHER; note = 2-Prime-Fluoro modified nucleoside
  modified_base order(1..2,4..10,14,16..23): mod_base = OTHER; note = 2-Prime-O-Methyl modified nucleoside
  modified_base order(1^2,22^23): mod_base = OTHER; note = (1,3-dimethylimidazolidin-2-ylidene) Phosphoramidate linkage
  modified_base order(2..13,14..22): mod_base = OTHER; note = Phosphorothioate linkage
  modified_base 13^14: mod_base = OTHER; note = Methylphosphonate linkage
  misc_feature 1..23: note = RM115368
gcccttcgtctnatggacaaagt

SEQ ID NO: 724 - DNA, 26 bp, synthetic construct
  source 1..26: mol_type = other DNA
  misc_feature 22..23: note = DNA
  misc_feature order(1..21,24..26): note = RNA
  modified_base 21: mod_base = OTHER; note = 2-Prime-O-Methoxyethyl modified 5-methyl Uridine
  modified_base 22: mod_base = OTHER; note = DNA nucleotide carrying a 6-amino-5-nitro-3-yl-2(1H)-pyridone nucleobase
  modified_base order(13,25): mod_base = OTHER; note = 2-Prime-Fluoro modified nucleoside
  modified_base order(1..12,14..20,24,26): mod_base = OTHER; note = 2-Prime-O-Methyl modified nucleoside
  modified_base order(1^2,25^26): mod_base = OTHER; note = (1,3-dimethylimidazolidin-2-ylidene) Phosphoramidate linkage
  modified_base order(2..23,24^25): mod_base = OTHER; note = Phosphorothioate linkage
  modified_base 23^24: mod_base = OTHER; note = Methylphosphonate linkage
  misc_feature 1..26: note = RM115369
cattaatttggcccttcgtctnatgg

SEQ ID NO: 725 - DNA, 26 bp, synthetic construct
  source 1..26: mol_type = other DNA
  misc_feature 19..20: note = DNA
  misc_feature order(1..18,21..26): note = RNA
  modified_base 18: mod_base = OTHER; note = 2-Prime-O-Methoxyethyl modified 5-methyl Uridine
  modified_base 19: mod_base = OTHER; note = DNA nucleotide carrying a 6-amino-5-nitro-3-yl-2(1H)-pyridone nucleobase
  modified_base order(10,22): mod_base = OTHER; note = 2-Prime-Fluoro modified nucleoside
  modified_base order(1..9,11..17,21,23..26): mod_base = OTHER; note = 2-Prime-O-Methyl modified nucleoside
  modified_base order(1^2,25^26): mod_base = OTHER; note = (1,3-dimethylimidazolidin-2-ylidene) Phosphoramidate linkage
  modified_base order(2..20,21..25): mod_base = OTHER; note = Phosphorothioate linkage
  modified_base 20^21: mod_base = OTHER; note = Methylphosphonate linkage
  misc_feature 1..26: note = RM115370
taatttggcccttcgtctnatggaca

SEQ ID NO: 726 - DNA, 26 bp, synthetic construct
  source 1..26: mol_type = other DNA
  misc_feature 16..17: note = DNA
  misc_feature order(1..15,18..26): note = RNA
  modified_base 15: mod_base = OTHER; note = 2-Prime-O-Methoxyethyl modified 5-methyl Uridine
  modified_base 16: mod_base = OTHER; note = DNA nucleotide carrying a 6-amino-5-nitro-3-yl-2(1H)-pyridone nucleobase
  modified_base order(7,19): mod_base = OTHER; note = 2-Prime-Fluoro modified nucleoside
  modified_base order(1..6,8..14,18,20..26): mod_base = OTHER; note = 2-Prime-O-Methyl modified nucleoside
  modified_base order(1^2,25^26): mod_base = OTHER; note = (1,3-dimethylimidazolidin-2-ylidene) Phosphoramidate linkage
  modified_base order(2..17,18..25): mod_base = OTHER; note = Phosphorothioate linkage
  modified_base 17^18: mod_base = OTHER; note = Methylphosphonate linkage
  misc_feature 1..26: note = RM115371
tttggcccttcgtctnatggacaaag

SEQ ID NO: 727 - DNA, 26 bp, synthetic construct
  source 1..26: mol_type = other DNA
  misc_feature 13..14: note = DNA
  misc_feature order(1..12,15..26): note = RNA
  modified_base 12: mod_base = OTHER; note = 2-Prime-O-Methoxyethyl modified 5-methyl Uridine
  modified_base 13: mod_base = OTHER; note = DNA nucleotide carrying a 6-amino-5-nitro-3-yl-2(1H)-pyridone nucleobase
  modified_base order(4,16): mod_base = OTHER; note = 2-Prime-Fluoro modified nucleoside
  modified_base order(1..3,5..11,15,17..26): mod_base = OTHER; note = 2-Prime-O-Methyl modified nucleoside
  modified_base order(1^2,25^26): mod_base = OTHER; note = (1,3-dimethylimidazolidin-2-ylidene) Phosphoramidate linkage
  modified_base order(2..14,15..25): mod_base = OTHER; note = Phosphorothioate linkage
  modified_base 14^15: mod_base = OTHER; note = Methylphosphonate linkage
  misc_feature 1..26: note = RM115372
ggcccttcgtctnatggacaaagtct

SEQ ID NO: 728 - DNA, 26 bp, synthetic construct
  source 1..26: mol_type = other DNA
  misc_feature 10..11: note = DNA
  misc_feature order(1..9,12..26): note = RNA
  modified_base 9: mod_base = OTHER; note = 2-Prime-O-Methoxyethyl modified 5-methyl Uridine
  modified_base 10: mod_base = OTHER; note = DNA nucleotide carrying a 6-amino-5-nitro-3-yl-2(1H)-pyridone nucleobase
  modified_base order(1,13): mod_base = OTHER; note = 2-Prime-Fluoro modified nucleoside
  modified_base order(2..8,12,14..26): mod_base = OTHER; note = 2-Prime-O-Methyl modified nucleoside
  modified_base order(1^2,25^26): mod_base = OTHER; note = (1,3-dimethylimidazolidin-2-ylidene) Phosphoramidate linkage
  modified_base order(2..11,12..25): mod_base = OTHER; note = Phosphorothioate linkage
  modified_base 11^12: mod_base = OTHER; note = Methylphosphonate linkage
  misc_feature 1..26: note = RM115373
ccttcgtctnatggacaaagtcttta

SEQ ID NO: 729 - DNA, 29 bp, synthetic construct
  source 1..29: mol_type = other DNA
  misc_feature 24..25: note = DNA
  misc_feature order(1..23,26..29): note = RNA
  modified_base 23: mod_base = OTHER; note = 2-Prime-O-Methoxyethyl modified 5-methyl Uridine
  modified_base 24: mod_base = OTHER; note = DNA nucleotide carrying a 6-amino-5-nitro-3-yl-2(1H)-pyridone nucleobase
  modified_base order(15,27): mod_base = OTHER; note = 2-Prime-Fluoro modified nucleoside
  modified_base order(1..14,16..22,26,28..29): mod_base = OTHER; note = 2-Prime-O-Methyl modified nucleoside
  modified_base order(1^2,28^29): mod_base = OTHER; note = (1,3-dimethylimidazolidin-2-ylidene) Phosphoramidate linkage
  modified_base order(2..25,26..28): mod_base = OTHER; note = Phosphorothioate linkage
  modified_base 25^26: mod_base = OTHER; note = Methylphosphonate linkage
  misc_feature 1..29: note = RM115374
gtcattaatttggcccttcgtctnatgga

SEQ ID NO: 730 - DNA, 29 bp, synthetic construct
  source 1..29: mol_type = other DNA
  misc_feature 21..22: note = DNA
  misc_feature order(1..20,23..29): note = RNA
  modified_base 20: mod_base = OTHER; note = 2-Prime-O-Methoxyethyl modified 5-methyl Uridine
  modified_base 21: mod_base = OTHER; note = DNA nucleotide carrying a 6-amino-5-nitro-3-yl-2(1H)-pyridone nucleobase
  modified_base order(12,24): mod_base = OTHER; note = 2-Prime-Fluoro modified nucleoside
  modified_base order(1..11,13..19,23,25..29): mod_base = OTHER; note = 2-Prime-O-Methyl modified nucleoside
  modified_base order(1^2,28^29): mod_base = OTHER; note = (1,3-dimethylimidazolidin-2-ylidene) Phosphoramidate linkage
  modified_base order(2..22,23..28): mod_base = OTHER; note = Phosphorothioate linkage
  modified_base 22^23: mod_base = OTHER; note = Methylphosphonate linkage
  misc_feature 1..29: note = RM115375
attaatttggcccttcgtctnatggacaa

SEQ ID NO: 731 - DNA, 29 bp, synthetic construct
  source 1..29: mol_type = other DNA
  misc_feature 18..19: note = DNA
  misc_feature order(1..17,20..29): note = RNA
  modified_base 17: mod_base = OTHER; note = 2-Prime-O-Methoxyethyl modified 5-methyl Uridine
  modified_base 18: mod_base = OTHER; note = DNA nucleotide carrying a 6-amino-5-nitro-3-yl-2(1H)-pyridone nucleobase
  modified_base order(9,21): mod_base = OTHER; note = 2-Prime-Fluoro modified nucleoside
  modified_base order(1..8,10..16,20,22..29): mod_base = OTHER; note = 2-Prime-O-Methyl modified nucleoside
  modified_base order(1^2,28^29): mod_base = OTHER; note = (1,3-dimethylimidazolidin-2-ylidene) Phosphoramidate linkage
  modified_base order(2..19,20..28): mod_base = OTHER; note = Phosphorothioate linkage
  modified_base 19^20: mod_base = OTHER; note = Methylphosphonate linkage
  misc_feature 1..29: note = RM115376
aatttggcccttcgtctnatggacaaagt

SEQ ID NO: 732 - DNA, 29 bp, synthetic construct
  source 1..29: mol_type = other DNA
  misc_feature 15..16: note = DNA
  misc_feature order(1..14,17..29): note = RNA
  modified_base 14: mod_base = OTHER; note = 2-Prime-O-Methoxyethyl modified 5-methyl Uridine
  modified_base 15: mod_base = OTHER; note = DNA nucleotide carrying a 6-amino-5-nitro-3-yl-2(1H)-pyridone nucleobase
  modified_base order(6,18): mod_base = OTHER; note = 2-Prime-Fluoro modified nucleoside
  modified_base order(1..5,7..13,17,19..29): mod_base = OTHER; note = 2-Prime-O-Methyl modified nucleoside
  modified_base order(1^2,28^29): mod_base = OTHER; note = (1,3-dimethylimidazolidin-2-ylidene) Phosphoramidate linkage
  modified_base order(2..16,17..28): mod_base = OTHER; note = Phosphorothioate linkage
  modified_base 16^17: mod_base = OTHER; note = Methylphosphonate linkage
  misc_feature 1..29: note = RM115377
ttggcccttcgtctnatggacaaagtctt

SEQ ID NO: 733 - DNA, 29 bp, synthetic construct
  source 1..29: mol_type = other DNA
  misc_feature 12..13: note = DNA
  misc_feature order(1..11,14..29): note = RNA
  modified_base 11: mod_base = OTHER; note = 2-Prime-O-Methoxyethyl modified 5-methyl Uridine
  modified_base 12: mod_base = OTHER; note = DNA nucleotide carrying a 6-amino-5-nitro-3-yl-2(1H)-pyridone nucleobase
  modified_base order(3,15): mod_base = OTHER; note = 2-Prime-Fluoro modified nucleoside
  modified_base order(1..2,4..10,14,16..29): mod_base = OTHER; note = 2-Prime-O-Methyl modified nucleoside
  modified_base order(1^2,28^29): mod_base = OTHER; note = (1,3-dimethylimidazolidin-2-ylidene) Phosphoramidate linkage
  modified_base order(2..13,14..28): mod_base = OTHER; note = Phosphorothioate linkage
  modified_base 13^14: mod_base = OTHER; note = Methylphosphonate linkage
  misc_feature 1..29: note = RM115378
gcccttcgtctnatggacaaagtctttaa

SEQ ID NO: 734 - DNA, 32 bp, synthetic construct; identical to SEQ ID NO: 79
  source 1..32: mol_type = other DNA
  misc_feature 10..11: note = DNA
  misc_feature order(1..9,12..32): note = RNA
  modified_base 9: mod_base = OTHER; note = 2-Prime-O-Methoxyethyl modified 5-methyl Uridine
  modified_base 10: mod_base = OTHER; note = DNA nucleotide carrying a 6-amino-5-nitro-3-yl-2(1H)-pyridone nucleobase
  modified_base order(3,13..14,24,29..30): mod_base = OTHER; note = 2-Prime-Fluoro modified nucleoside
  modified_base order(1..2,4..8,12,15..23,25..28,31..32): mod_base = OTHER; note = 2-Prime-O-Methyl modified nucleoside
  modified_base order(1^2,31^32): mod_base = OTHER; note = (1,3-dimethylimidazolidin-2-ylidene) Phosphoramidate linkage
  modified_base order(2..11,12..31): mod_base = OTHER; note = Phosphorothioate linkage
  modified_base 11^12: mod_base = OTHER; note = Methylphosphonate linkage
  misc_feature 1..32: note = RM115379

SEQ ID NO: 735 - DNA, 32 bp, synthetic construct; identical to SEQ ID NO: 75
  source 1..32: mol_type = other DNA
  misc_feature 22..23: note = DNA
  misc_feature order(1..21,24..32): note = RNA
  modified_base 21: mod_base = OTHER; note = 2-Prime-O-Methoxyethyl modified 5-methyl Uridine
  modified_base 22: mod_base = OTHER; note = DNA nucleotide carrying a 6-amino-5-nitro-3-yl-2(1H)-pyridone nucleobase
  modified_base order(4..5,10,20,25,31): mod_base = OTHER; note = 2-Prime-Fluoro modified nucleoside
  modified_base order(1..3,6..9,11..19,24,26..30,32): mod_base = OTHER; note = 2-Prime-O-Methyl modified nucleoside
  modified_base order(1^2,31^32): mod_base = OTHER; note = (1,3-dimethylimidazolidin-2-ylidene) Phosphoramidate linkage
  modified_base order(2..23,24..31): mod_base = OTHER; note = Phosphorothioate linkage
  modified_base 23^24: mod_base = OTHER; note = Methylphosphonate linkage
  misc_feature 1..32: note = RM115380

SEQ ID NO: 736 - DNA, 32 bp, synthetic construct; identical to SEQ ID NO: 76
  source 1..32: mol_type = other DNA
  misc_feature 19..20: note = DNA
  misc_feature order(1..18,21..32): note = RNA
  modified_base 18: mod_base = OTHER; note = 2-Prime-O-Methoxyethyl modified 5-methyl Uridine
  modified_base 19: mod_base = OTHER; note = DNA nucleotide carrying a 6-amino-5-nitro-3-yl-2(1H)-pyridone nucleobase
  modified_base order(1..2,7,17,22,28): mod_base = OTHER; note = 2-Prime-Fluoro modified nucleoside
  modified_base order(3..6,8..16,21,23..27,29..32): mod_base = OTHER; note = 2-Prime-O-Methyl modified nucleoside
  modified_base order(1^2,31^32): mod_base = OTHER; note = (1,3-dimethylimidazolidin-2-ylidene) Phosphoramidate linkage
  modified_base order(2..20,21..31): mod_base = OTHER; note = Phosphorothioate linkage
  modified_base 20^21: mod_base = OTHER; note = Methylphosphonate linkage
  misc_feature 1..32: note = RM115381

SEQ ID NO: 737 - DNA, 23 bp, synthetic construct
  source 1..23: mol_type = other DNA
  misc_feature 9..10: note = DNA
  misc_feature order(1..8,11..23): note = RNA
  modified_base 8: mod_base = OTHER; note = 2-Prime-O-Methoxyethyl modified 5-methyl Uridine
  modified_base 9: mod_base = OTHER; note = DNA nucleotide carrying a 6-amino-5-nitro-3-yl-2(1H)-pyridone nucleobase
  modified_base order(2,12..13,23): mod_base = OTHER; note = 2-Prime-Fluoro modified nucleoside
  modified_base order(1,3..7,11,14..22): mod_base = OTHER; note = 2-Prime-O-Methyl modified nucleoside
  modified_base order(1^2,22^23): mod_base = OTHER; note = (1,3-dimethylimidazolidin-2-ylidene) Phosphoramidate linkage
  modified_base order(2..10,11..22): mod_base = OTHER; note = Phosphorothioate linkage
  modified_base 10^11: mod_base = OTHER; note = Methylphosphonate linkage
  misc_feature 1..23: note = RM115382
cttcgtctnatggacaaagtctt

SEQ ID NO: 738 - DNA, 23 bp, synthetic construct
  source 1..23: mol_type = other DNA
  misc_feature 18..19: note = DNA
  misc_feature order(1..17,20..23): note = RNA
  modified_base 17: mod_base = OTHER; note = 2-Prime-O-Methoxyethyl modified 5-methyl Uridine
  modified_base 18: mod_base = OTHER; note = DNA nucleotide carrying a 6-amino-5-nitro-3-yl-2(1H)-pyridone nucleobase
  modified_base order(11,21): mod_base = OTHER; note = 2-Prime-Fluoro modified nucleoside
  modified_base order(1..10,12..16,20,22..23): mod_base = OTHER; note = 2-Prime-O-Methyl modified nucleoside
  modified_base order(1^2,22^23): mod_base = OTHER; note = (1,3-dimethylimidazolidin-2-ylidene) Phosphoramidate linkage
  modified_base order(2..19,20..22): mod_base = OTHER; note = Phosphorothioate linkage
  modified_base 19^20: mod_base = OTHER; note = Methylphosphonate linkage
  misc_feature 1..23: note = RM115383
aatttggcccttcgtctnatgga

SEQ ID NO: 739 - DNA, 23 bp, synthetic construct
  source 1..23: mol_type = other DNA
  misc_feature 15..16: note = DNA
  misc_feature order(1..14,17..23): note = RNA
  modified_base 14: mod_base = OTHER; note = 2-Prime-O-Methoxyethyl modified 5-methyl Uridine
  modified_base 15: mod_base = OTHER; note = DNA nucleotide carrying a 6-amino-5-nitro-3-yl-2(1H)-pyridone nucleobase
  modified_base order(8,18): mod_base = OTHER; note = 2-Prime-Fluoro modified nucleoside
  modified_base order(1..7,9..13,17,19..23): mod_base = OTHER; note = 2-Prime-O-Methyl modified nucleoside
  modified_base order(1^2,22^23): mod_base = OTHER; note = (1,3-dimethylimidazolidin-2-ylidene) Phosphoramidate linkage
  modified_base order(2..16,17..22): mod_base = OTHER; note = Phosphorothioate linkage
  modified_base 16^17: mod_base = OTHER; note = Methylphosphonate linkage
  misc_feature 1..23: note = RM115384
ttggcccttcgtctnatggacaa

SEQ ID NO: 740 - DNA, 23 bp, synthetic construct
  source 1..23: mol_type = other DNA
  misc_feature 12..13: note = DNA
  misc_feature order(1..11,14..23): note = RNA
  modified_base 11: mod_base = OTHER; note = 2-Prime-O-Methoxyethyl modified 5-methyl Uridine
  modified_base 12: mod_base = OTHER; note = DNA nucleotide carrying a 6-amino-5-nitro-3-yl-2(1H)-pyridone nucleobase
  modified_base order(5,15): mod_base = OTHER; note = 2-Prime-Fluoro modified nucleoside
  modified_base order(1..4,6..10,14,16..23): mod_base = OTHER; note = 2-Prime-O-Methyl modified nucleoside
  modified_base order(1^2,22^23): mod_base = OTHER; note = (1,3-dimethylimidazolidin-2-ylidene) Phosphoramidate linkage
  modified_base order(2..13,14..22): mod_base = OTHER; note = Phosphorothioate linkage
  modified_base 13^14: mod_base = OTHER; note = Methylphosphonate linkage
  misc_feature 1..23: note = RM115385
gcccttcgtctnatggacaaagt

SEQ ID NO: 741 - DNA, 23 bp, synthetic construct
  source 1..23: mol_type = other DNA
  misc_feature 9..10: note = DNA
  misc_feature order(1..8,11..23): note = RNA
  modified_base 8: mod_base = OTHER; note = 2-Prime-O-Methoxyethyl modified 5-methyl Uridine
  modified_base 9: mod_base = OTHER; note = DNA nucleotide carrying a 6-amino-5-nitro-3-yl-2(1H)-pyridone nucleobase
  modified_base order(2,12): mod_base = OTHER; note = 2-Prime-Fluoro modified nucleoside
  modified_base order(1,3..7,11,13..23): mod_base = OTHER; note = 2-Prime-O-Methyl modified nucleoside
  modified_base order(1^2,22^23): mod_base = OTHER; note = (1,3-dimethylimidazolidin-2-ylidene) Phosphoramidate linkage
  modified_base order(2..10,11..22): mod_base = OTHER; note = Phosphorothioate linkage
  modified_base 10^11: mod_base = OTHER; note = Methylphosphonate linkage
  misc_feature 1..23: note = RM115386
cttcgtctnatggacaaagtctt

SEQ ID NO: 742 - DNA, 26 bp, synthetic construct
  source 1..26: mol_type = other DNA
  misc_feature 22..23: note = DNA
  misc_feature order(1..21,24..26): note = RNA
  modified_base 21: mod_base = OTHER; note = 2-Prime-O-Methoxyethyl modified 5-methyl Uridine
  modified_base 22: mod_base = OTHER; note = DNA nucleotide carrying a 6-amino-5-nitro-3-yl-2(1H)-pyridone nucleobase
  modified_base order(15,25): mod_base = OTHER; note = 2-Prime-Fluoro modified nucleoside
  modified_base order(1..14,16..20,24,26): mod_base = OTHER; note = 2-Prime-O-Methyl modified nucleoside
  modified_base order(1^2,25^26): mod_base = OTHER; note = (1,3-dimethylimidazolidin-2-ylidene) Phosphoramidate linkage
  modified_base order(2..23,24^25): mod_base = OTHER; note = Phosphorothioate linkage
  modified_base 23^24: mod_base = OTHER; note = Methylphosphonate linkage
  misc_feature 1..26: note = RM115387
cattaatttggcccttcgtctnatgg

SEQ ID NO: 743 - DNA, 26 bp, synthetic construct
  source 1..26: mol_type = other DNA
  misc_feature 19..20: note = DNA
  misc_feature order(1..18,21..26): note = RNA
  modified_base 18: mod_base = OTHER; note = 2-Prime-O-Methoxyethyl modified 5-methyl Uridine
  modified_base 19: mod_base = OTHER; note = DNA nucleotide carrying a 6-amino-5-nitro-3-yl-2(1H)-pyridone nucleobase
  modified_base order(12,22): mod_base = OTHER; note = 2-Prime-Fluoro modified nucleoside
  modified_base order(1..11,13..17,21,23..26): mod_base = OTHER; note = 2-Prime-O-Methyl modified nucleoside
  modified_base order(1^2,25^26): mod_base = OTHER; note = (1,3-dimethylimidazolidin-2-ylidene) Phosphoramidate linkage
  modified_base order(2..20,21..25): mod_base = OTHER; note = Phosphorothioate linkage
  modified_base 20^21: mod_base = OTHER; note = Methylphosphonate linkage
  misc_feature 1..26: note = RM115388
taatttggcccttcgtctnatggaca

SEQ ID NO: 744 - DNA, 26 bp, synthetic construct
  source 1..26: mol_type = other DNA
  misc_feature 16..17: note = DNA
  misc_feature order(1..15,18..26): note = RNA
  modified_base 15: mod_base = OTHER; note = 2-Prime-O-Methoxyethyl modified 5-methyl Uridine
  modified_base 16: mod_base = OTHER; note = DNA nucleotide carrying a 6-amino-5-nitro-3-yl-2(1H)-pyridone nucleobase
  modified_base order(9,19): mod_base = OTHER; note = 2-Prime-Fluoro modified nucleoside
  modified_base order(1..8,10..14,18,20..26): mod_base = OTHER; note = 2-Prime-O-Methyl modified nucleoside
  modified_base order(1^2,25^26): mod_base = OTHER; note = (1,3-dimethylimidazolidin-2-ylidene) Phosphoramidate linkage
  modified_base order(2..17,18..25): mod_base = OTHER; note = Phosphorothioate linkage
  modified_base 17^18: mod_base = OTHER; note = Methylphosphonate linkage
  misc_feature 1..26: note = RM115389
tttggcccttcgtctnatggacaaag

SEQ ID NO: 745 - DNA, 26 bp, synthetic construct
  source 1..26: mol_type = other DNA
  misc_feature 13..14: note = DNA
  misc_feature order(1..12,15..26): note = RNA
  modified_base 12: mod_base = OTHER; note = 2-Prime-O-Methoxyethyl modified 5-methyl Uridine
  modified_base 13: mod_base = OTHER; note = DNA nucleotide carrying a 6-amino-5-nitro-3-yl-2(1H)-pyridone nucleobase
  modified_base order(6,16): mod_base = OTHER; note = 2-Prime-Fluoro modified nucleoside
  modified_base order(1..5,7..11,15,17..26): mod_base = OTHER; note = 2-Prime-O-Methyl modified nucleoside
  modified_base order(1^2,25^26): mod_base = OTHER; note = (1,3-dimethylimidazolidin-2-ylidene) Phosphoramidate linkage
  modified_base order(2..14,15..25): mod_base = OTHER; note = Phosphorothioate linkage
  modified_base 14^15: mod_base = OTHER; note = Methylphosphonate linkage
  misc_feature 1..26: note = RM115390
ggcccttcgtctnatggacaaagtct

SEQ ID NO: 746 - DNA, 26 bp, synthetic construct
  source 1..26: mol_type = other DNA
  misc_feature 10..11: note = DNA
  misc_feature order(1..9,12..26): note = RNA
  modified_base 9: mod_base = OTHER; note = 2-Prime-O-Methoxyethyl modified 5-methyl Uridine
  modified_base 10: mod_base = OTHER; note = DNA nucleotide carrying a 6-amino-5-nitro-3-yl-2(1H)-pyridone nucleobase
  modified_base order(3,13): mod_base = OTHER; note = 2-Prime-Fluoro modified nucleoside
  modified_base order(1..2,4..8,12,14..26): mod_base = OTHER; note = 2-Prime-O-Methyl modified nucleoside
  modified_base order(1^2,25^26): mod_base = OTHER; note = (1,3-dimethylimidazolidin-2-ylidene) Phosphoramidate linkage
  modified_base order(2..11,12..25): mod_base = OTHER; note = Phosphorothioate linkage
  modified_base 11^12: mod_base = OTHER; note = Methylphosphonate linkage
  misc_feature 1..26: note = RM115391
ccttcgtctnatggacaaagtcttta

SEQ ID NO: 747 - DNA, 29 bp, synthetic construct
  source 1..29: mol_type = other DNA
  misc_feature 24..25: note = DNA
  misc_feature order(1..23,26..29): note = RNA
  modified_base 23: mod_base = OTHER; note = 2-Prime-O-Methoxyethyl modified 5-methyl Uridine
  modified_base 24: mod_base = OTHER; note = DNA nucleotide carrying a 6-amino-5-nitro-3-yl-2(1H)-pyridone nucleobase
  modified_base order(17,27): mod_base = OTHER; note = 2-Prime-Fluoro modified nucleoside
  modified_base order(1..16,18..22,26,28..29): mod_base = OTHER; note = 2-Prime-O-Methyl modified nucleoside
  modified_base order(1^2,28^29): mod_base = OTHER; note = (1,3-dimethylimidazolidin-2-ylidene) Phosphoramidate linkage
  modified_base order(2..25,26..28): mod_base = OTHER; note = Phosphorothioate linkage
  modified_base 25^26: mod_base = OTHER; note = Methylphosphonate linkage
  misc_feature 1..29: note = RM115392
gtcattaatttggcccttcgtctnatgga

SEQ ID NO: 748 - DNA, 29 bp, synthetic construct
  source 1..29: mol_type = other DNA
  misc_feature 21..22: note = DNA
  misc_feature order(1..20,23..29): note = RNA
  modified_base 20: mod_base = OTHER; note = 2-Prime-O-Methoxyethyl modified 5-methyl Uridine
  modified_base 21: mod_base = OTHER; note = DNA nucleotide carrying a 6-amino-5-nitro-3-yl-2(1H)-pyridone nucleobase
  modified_base order(14,24): mod_base = OTHER; note = 2-Prime-Fluoro modified nucleoside
  modified_base order(1..13,15..19,23,25..29): mod_base = OTHER; note = 2-Prime-O-Methyl modified nucleoside
  modified_base order(1^2,28^29): mod_base = OTHER; note = (1,3-dimethylimidazolidin-2-ylidene) Phosphoramidate linkage
  modified_base order(2..22,23..28): mod_base = OTHER; note = Phosphorothioate linkage
  modified_base 22^23: mod_base = OTHER; note = Methylphosphonate linkage
  misc_feature 1..29: note = RM115393
attaatttggcccttcgtctnatggacaa

SEQ ID NO: 749 - DNA, 29 bp, synthetic construct
  source 1..29: mol_type = other DNA
  misc_feature 18..19: note = DNA
  misc_feature order(1..17,20..29): note = RNA
  modified_base 17: mod_base = OTHER; note = 2-Prime-O-Methoxyethyl modified 5-methyl Uridine
  modified_base 18: mod_base = OTHER; note = DNA nucleotide carrying a 6-amino-5-nitro-3-yl-2(1H)-pyridone nucleobase
  modified_base order(11,21): mod_base = OTHER; note = 2-Prime-Fluoro modified nucleoside
  modified_base order(1..10,12..16,20,22..29): mod_base = OTHER; note = 2-Prime-O-Methyl modified nucleoside
  modified_base order(1^2,28^29): mod_base = OTHER; note = (1,3-dimethylimidazolidin-2-ylidene) Phosphoramidate linkage
  modified_base order(2..19,20..28): mod_base = OTHER; note = Phosphorothioate linkage
  modified_base 19^20: mod_base = OTHER; note = Methylphosphonate linkage
  misc_feature 1..29: note = RM115394
aatttggcccttcgtctnatggacaaagt

SEQ ID NO: 750 - DNA, 29 bp, synthetic construct
  source 1..29: mol_type = other DNA
  misc_feature 15..16: note = DNA
  misc_feature order(1..14,17..29): note = RNA
  modified_base 14: mod_base = OTHER; note = 2-Prime-O-Methoxyethyl modified 5-methyl Uridine
  modified_base 15: mod_base = OTHER; note = DNA nucleotide carrying a 6-amino-5-nitro-3-yl-2(1H)-pyridone nucleobase
  modified_base order(8,18): mod_base = OTHER; note = 2-Prime-Fluoro modified nucleoside
  modified_base order(1..7,9..13,17,19..29): mod_base = OTHER; note = 2-Prime-O-Methyl modified nucleoside
  modified_base order(1^2,28^29): mod_base = OTHER; note = (1,3-dimethylimidazolidin-2-ylidene) Phosphoramidate linkage
  modified_base order(2..16,17..28): mod_base = OTHER; note = Phosphorothioate linkage
  modified_base 16^17: mod_base = OTHER; note = Methylphosphonate linkage
  misc_feature 1..29: note = RM115395
ttggcccttcgtctnatggacaaagtctt

SEQ ID NO: 751 - DNA, 29 bp, synthetic construct
  source 1..29: mol_type = other DNA
  misc_feature 12..13: note = DNA
  misc_feature order(1..11,14..29): note = RNA
  modified_base 11: mod_base = OTHER; note = 2-Prime-O-Methoxyethyl modified 5-methyl Uridine
  modified_base 12: mod_base = OTHER; note = DNA nucleotide carrying a 6-amino-5-nitro-3-yl-2(1H)-pyridone nucleobase
  modified_base order(5,15): mod_base = OTHER; note = 2-Prime-Fluoro modified nucleoside
  modified_base order(1..4,6..10,14,16..29): mod_base = OTHER; note = 2-Prime-O-Methyl modified nucleoside
  modified_base order(1^2,28^29): mod_base = OTHER; note = (1,3-dimethylimidazolidin-2-ylidene) Phosphoramidate linkage
  modified_base order(2..13,14..28): mod_base = OTHER; note = Phosphorothioate linkage
  modified_base 13^14: mod_base = OTHER; note = Methylphosphonate linkage
  misc_feature 1..29: note = RM115396
gcccttcgtctnatggacaaagtctttaa

SEQ ID NO: 752 - DNA, 29 bp, synthetic construct
  source 1..29: mol_type = other DNA
  misc_feature 9..10: note = DNA
  misc_feature order(1..8,11..29): note = RNA
  modified_base 8: mod_base = OTHER; note = 2-Prime-O-Methoxyethyl modified 5-methyl Uridine
  modified_base 9: mod_base = OTHER; note = DNA nucleotide carrying a 6-amino-5-nitro-3-yl-2(1H)-pyridone nucleobase
  modified_base order(2,12): mod_base = OTHER; note = 2-Prime-Fluoro modified nucleoside
  modified_base order(1,3..7,11,13..29): mod_base = OTHER; note = 2-Prime-O-Methyl modified nucleoside
  modified_base order(1^2,28^29): mod_base = OTHER; note = (1,3-dimethylimidazolidin-2-ylidene) Phosphoramidate linkage
  modified_base order(2..10,11..28): mod_base = OTHER; note = Phosphorothioate linkage
  modified_base 10^11: mod_base = OTHER; note = Methylphosphonate linkage
  misc_feature 1..29: note = RM115397
cttcgtctnatggacaaagtctttaagac

SEQ ID NO: 753 - DNA, 32 bp, synthetic construct; identical to SEQ ID NO: 76
  source 1..32: mol_type = other DNA
  misc_feature 19..20: note = DNA
  misc_feature order(1..18,21..32): note = RNA
  modified_base 18: mod_base = OTHER; note = 2-Prime-O-Methoxyethyl modified 5-methyl Uridine
  modified_base 19: mod_base = OTHER; note = DNA nucleotide carrying a 6-amino-5-nitro-3-yl-2(1H)-pyridone nucleobase
  modified_base order(1,15..17,22..23,25,29..30): mod_base = OTHER; note = 2-Prime-Fluoro modified nucleoside
  modified_base order(2..14,21,24,26..28,31..32): mod_base = OTHER; note = 2-Prime-O-Methyl modified nucleoside
  modified_base order(1^2,31^32): mod_base = OTHER; note = (1,3-dimethylimidazolidin-2-ylidene) Phosphoramidate linkage
  modified_base order(2..20,21..31): mod_base = OTHER; note = Phosphorothioate linkage
  modified_base 20^21: mod_base = OTHER; note = Methylphosphonate linkage
  misc_feature 1..32: note = RM115398

SEQ ID NO: 754 - DNA, 32 bp, synthetic construct; identical to SEQ ID NO: 79
  source 1..32: mol_type = other DNA
  misc_feature 10..11: note = DNA
  misc_feature order(1..9,12..32): note = RNA
  modified_base 9: mod_base = OTHER; note = 2-Prime-O-Methoxyethyl modified 5-methyl Uridine
  modified_base 10: mod_base = OTHER; note = DNA nucleotide carrying a 6-amino-5-nitro-3-yl-2(1H)-pyridone nucleobase
  modified_base order(1..2,6,8,13..16,30): mod_base = OTHER; note = 2-Prime-Fluoro modified nucleoside
  modified_base order(3..5,7,12,17..29,31..32): mod_base = OTHER; note = 2-Prime-O-Methyl modified nucleoside
  modified_base order(1^2,31^32): mod_base = OTHER; note = (1,3-dimethylimidazolidin-2-ylidene) Phosphoramidate linkage
  modified_base order(2..11,12..31): mod_base = OTHER; note = Phosphorothioate linkage
  modified_base 11^12: mod_base = OTHER; note = Methylphosphonate linkage
  misc_feature 1..32: note = RM115399

SEQ ID NO: 755 - DNA, 23 bp, synthetic construct
  source 1..23: mol_type = other DNA
  misc_feature 12..13: note = DNA
  misc_feature order(1..11,14..23): note = RNA
  modified_base 11: mod_base = OTHER; note = 2-Prime-O-Methoxyethyl modified 5-methyl Uridine
  modified_base 12: mod_base = OTHER; note = DNA nucleotide carrying a 6-amino-5-nitro-3-yl-2(1H)-pyridone nucleobase
  modified_base order(10,15..16,18,22..23): mod_base = OTHER; note = 2-Prime-Fluoro modified nucleoside
  modified_base order(1..9,14,17,19..21): mod_base = OTHER; note = 2-Prime-O-Methyl modified nucleoside
  modified_base order(1^2,22^23): mod_base = OTHER; note = (1,3-dimethylimidazolidin-2-ylidene) Phosphoramidate linkage
  modified_base order(2..13,14..22): mod_base = OTHER; note = Phosphorothioate linkage
  modified_base 13^14: mod_base = OTHER; note = Methylphosphonate linkage
  misc_feature 1..23: note = RM115400
gcccttcgtctnatggacaaagt

SEQ ID NO: 756 - DNA, 23 bp, synthetic construct
  source 1..23: mol_type = other DNA
  misc_feature 9..10: note = DNA
  misc_feature order(1..8,11..23): note = RNA
  modified_base 8: mod_base = OTHER; note = 2-Prime-O-Methoxyethyl modified 5-methyl Uridine
  modified_base 9: mod_base = OTHER; note = DNA nucleotide carrying a 6-amino-5-nitro-3-yl-2(1H)-pyridone nucleobase
  modified_base order(7,12..13,15,19..20): mod_base = OTHER; note = 2-Prime-Fluoro modified nucleoside
  modified_base order(1..6,11,14,16..18,21..23): mod_base = OTHER; note = 2-Prime-O-Methyl modified nucleoside
  modified_base order(1^2,22^23): mod_base = OTHER; note = (1,3-dimethylimidazolidin-2-ylidene) Phosphoramidate linkage
  modified_base order(2..10,11..22): mod_base = OTHER; note = Phosphorothioate linkage
  modified_base 10^11: mod_base = OTHER; note = Methylphosphonate linkage
  misc_feature 1..23: note = RM115401
cttcgtctnatggacaaagtctt

SEQ ID NO: 757 - DNA, 23 bp, synthetic construct
  source 1..23: mol_type = other DNA
  misc_feature 6..7: note = DNA
  misc_feature order(1..5,8..23): note = RNA
  modified_base 5: mod_base = OTHER; note = 2-Prime-O-Methoxyethyl modified 5-methyl Uridine
  modified_base 6: mod_base = OTHER; note = DNA nucleotide carrying a 6-amino-5-nitro-3-yl-2(1H)-pyridone nucleobase
  modified_base order(4,9..10,12,16..17): mod_base = OTHER; note = 2-Prime-Fluoro modified nucleoside
  modified_base order(1..3,8,11,13..15,18..23): mod_base = OTHER; note = 2-Prime-O-Methyl modified nucleoside
  modified_base order(1^2,22^23): mod_base = OTHER; note = (1,3-dimethylimidazolidin-2-ylidene) Phosphoramidate linkage
  modified_base order(2..7,8..22): mod_base = OTHER; note = Phosphorothioate linkage
  modified_base 7^8: mod_base = OTHER; note = Methylphosphonate linkage
  misc_feature 1..23: note = RM115402
cgtctnatggacaaagtctttaa

SEQ ID NO: 758 - DNA, 32 bp, synthetic construct; identical to SEQ ID NO: 76
  source 1..32: mol_type = other DNA
  misc_feature 19..20: note = DNA
  misc_feature order(1..18,21..32): note = RNA
  modified_base 18: mod_base = OTHER; note = 2-Prime-O-Methoxyethyl modified 5-methyl Uridine
  modified_base 19: mod_base = OTHER; note = DNA nucleotide carrying a 6-amino-5-nitro-3-yl-2(1H)-pyridone nucleobase
  modified_base order(17,22..23,25,29..30): mod_base = OTHER; note = 2-Prime-Fluoro modified nucleoside
  modified_base order(1..16,21,24,26..28,31..32): mod_base = OTHER; note = 2-Prime-O-Methyl modified nucleoside
  modified_base order(1^2,31^32): mod_base = OTHER; note = (1,3-dimethylimidazolidin-2-ylidene) Phosphoramidate linkage
  modified_base order(2..20,21..31): mod_base = OTHER; note = Phosphorothioate linkage
  modified_base 20^21: mod_base = OTHER; note = Methylphosphonate linkage
  misc_feature 1..32: note = RM115403

SEQ ID NO: 759 - DNA, 32 bp, synthetic construct; identical to SEQ ID NO: 77
  source 1..32: mol_type = other DNA
  misc_feature 16..17: note = DNA
  misc_feature order(1..15,18..32): note = RNA
  modified_base 15: mod_base = OTHER; note = 2-Prime-O-Methoxyethyl modified 5-methyl Uridine
  modified_base 16: mod_base = OTHER; note = DNA nucleotide carrying a 6-amino-5-nitro-3-yl-2(1H)-pyridone nucleobase
  modified_base order(14,19..20,22,26..27): mod_base = OTHER; note = 2-Prime-Fluoro modified nucleoside
  modified_base order(1..13,18,21,23..25,28..32): mod_base = OTHER; note = 2-Prime-O-Methyl modified nucleoside
  modified_base order(1^2,31^32): mod_base = OTHER; note = (1,3-dimethylimidazolidin-2-ylidene) Phosphoramidate linkage
  modified_base order(2..17,18..31): mod_base = OTHER; note = Phosphorothioate linkage
  modified_base 17^18: mod_base = OTHER; note = Methylphosphonate linkage
  misc_feature 1..32: note = RM115404

SEQ ID NO: 760 - DNA, 32 bp, synthetic construct; identical to SEQ ID NO: 78
  source 1..32: mol_type = other DNA
  misc_feature 13..14: note = DNA
  misc_feature order(1..12,15..32): note = RNA
  modified_base 12: mod_base = OTHER; note = 2-Prime-O-Methoxyethyl modified 5-methyl Uridine
  modified_base 13: mod_base = OTHER; note = DNA nucleotide carrying a 6-amino-5-nitro-3-yl-2(1H)-pyridone nucleobase
  modified_base order(11,16..17,19,23..24): mod_base = OTHER; note = 2-Prime-Fluoro modified nucleoside
  modified_base order(1..10,15,18,20..22,25..32): mod_base = OTHER; note = 2-Prime-O-Methyl modified nucleoside
  modified_base order(1^2,31^32): mod_base = OTHER; note = (1,3-dimethylimidazolidin-2-ylidene) Phosphoramidate linkage
  modified_base order(2..14,15..31): mod_base = OTHER; note = Phosphorothioate linkage
  modified_base 14^15: mod_base = OTHER; note = Methylphosphonate linkage
  misc_feature 1..32: note = RM115405

SEQ ID NO: 761 - DNA, 32 bp, synthetic construct; identical to SEQ ID NO: 79
  source 1..32: mol_type = other DNA
  misc_feature 10..11: note = DNA
  misc_feature order(1..9,12..32): note = RNA
  modified_base 9: mod_base = OTHER; note = 2-Prime-O-Methoxyethyl modified 5-methyl Uridine
  modified_base 10: mod_base = OTHER; note = DNA nucleotide carrying a 6-amino-5-nitro-3-yl-2(1H)-pyridone nucleobase
  modified_base order(8,13..14,16,20..21): mod_base = OTHER; note = 2-Prime-Fluoro modified nucleoside
  modified_base order(1..7,12,15,17..19,22..32): mod_base = OTHER; note = 2-Prime-O-Methyl modified nucleoside
  modified_base order(1^2,31^32): mod_base = OTHER; note = (1,3-dimethylimidazolidin-2-ylidene) Phosphoramidate linkage
  modified_base order(2..11,12..31): mod_base = OTHER; note = Phosphorothioate linkage
  modified_base 11^12: mod_base = OTHER; note = Methylphosphonate linkage
  misc_feature 1..32: note = RM115406

SEQ ID NO: 762 - DNA, 32 bp, synthetic construct; identical to SEQ ID NO: 80
  source 1..32: mol_type = other DNA
  misc_feature 7..8: note = DNA
  misc_feature order(1..6,9..32): note = RNA
  modified_base 6: mod_base = OTHER; note = 2-Prime-O-Methoxyethyl modified 5-methyl Uridine
  modified_base 7: mod_base = OTHER; note = DNA nucleotide carrying a 6-amino-5-nitro-3-yl-2(1H)-pyridone nucleobase
  modified_base order(5,10..11,13,17..18): mod_base = OTHER; note = 2-Prime-Fluoro modified nucleoside
  modified_base order(1..4,9,12,14..16,19..32): mod_base = OTHER; note = 2-Prime-O-Methyl modified nucleoside
  modified_base order(1^2,31^32): mod_base = OTHER; note = (1,3-dimethylimidazolidin-2-ylidene) Phosphoramidate linkage
  modified_base order(2..8,9..31): mod_base = OTHER; note = Phosphorothioate linkage
  modified_base 8^9: mod_base = OTHER; note = Methylphosphonate linkage
  misc_feature 1..32: note = RM115407

SEQ ID NO: 763 - DNA, 23 bp, synthetic construct
  source 1..23: mol_type = other DNA
  misc_feature 18..19: note = DNA
  misc_feature order(1..17,20..23): note = RNA
  modified_base 17: mod_base = OTHER; note = 2-Prime-O-Methoxyethyl modified 5-methyl Uridine
  modified_base 18: mod_base = OTHER; note = DNA nucleotide carrying a 6-amino-5-nitro-3-yl-2(1H)-pyridone nucleobase
  modified_base order(9..10,14,16,21..22): mod_base = OTHER; note = 2-Prime-Fluoro modified nucleoside
  modified_base order(1..8,11..13,15,20,23): mod_base = OTHER; note = 2-Prime-O-Methyl modified nucleoside
  modified_base order(1^2,22^23): mod_base = OTHER; note = (1,3-dimethylimidazolidin-2-ylidene) Phosphoramidate linkage
  modified_base order(2..19,20..22): mod_base = OTHER; note = Phosphorothioate linkage
  modified_base 19^20: mod_base = OTHER; note = Methylphosphonate linkage
  misc_feature 1..23: note = RM115408
aatttggcccttcgtctnatgga

SEQ ID NO: 764 - DNA, 23 bp, synthetic construct
  source 1..23: mol_type = other DNA
  misc_feature 15..16: note = DNA
  misc_feature order(1..14,17..23): note = RNA
  modified_base 14: mod_base = OTHER; note = 2-Prime-O-Methoxyethyl modified 5-methyl Uridine
  modified_base 15: mod_base = OTHER; note = DNA nucleotide carrying a 6-amino-5-nitro-3-yl-2(1H)-pyridone nucleobase
  modified_base order(6..7,11,13,18..19): mod_base = OTHER; note = 2-Prime-Fluoro modified nucleoside
  modified_base order(1..5,8..10,12,17,20..23): mod_base = OTHER; note = 2-Prime-O-Methyl modified nucleoside
  modified_base order(1^2,22^23): mod_base = OTHER; note = (1,3-dimethylimidazolidin-2-ylidene) Phosphoramidate linkage
  modified_base order(2..16,17..22): mod_base = OTHER; note = Phosphorothioate linkage
  modified_base 16^17: mod_base = OTHER; note = Methylphosphonate linkage
  misc_feature 1..23: note = RM115409
ttggcccttcgtctnatggacaa

SEQ ID NO: 765 - DNA, 23 bp, synthetic construct
  source 1..23: mol_type = other DNA
  misc_feature 12..13: note = DNA
  misc_feature order(1..11,14..23): note = RNA
  modified_base 11: mod_base = OTHER; note = 2-Prime-O-Methoxyethyl modified 5-methyl Uridine
  modified_base 12: mod_base = OTHER; note = DNA nucleotide carrying a 6-amino-5-nitro-3-yl-2(1H)-pyridone nucleobase
  modified_base order(3..4,8,10,15..16): mod_base = OTHER; note = 2-Prime-Fluoro modified nucleoside
  modified_base order(1..2,5..7,9,14,17..23): mod_base = OTHER; note = 2-Prime-O-Methyl modified nucleoside
  modified_base order(1^2,22^23): mod_base = OTHER; note = (1,3-dimethylimidazolidin-2-ylidene) Phosphoramidate linkage
  modified_base order(2..13,14..22): mod_base = OTHER; note = Phosphorothioate linkage
  modified_base 13^14: mod_base = OTHER; note = Methylphosphonate linkage
  misc_feature 1..23: note = RM115410
gcccttcgtctnatggacaaagt

SEQ ID NO: 766 - DNA, 32 bp, synthetic construct; identical to SEQ ID NO: 73
  source 1..32: mol_type = other DNA
  misc_feature 28..29: note = DNA
  misc_feature order(1..27,30..32): note = RNA
  modified_base 27: mod_base = OTHER; note = 2-Prime-O-Methoxyethyl modified 5-methyl Uridine
  modified_base 28: mod_base = OTHER; note = DNA nucleotide carrying a 6-amino-5-nitro-3-yl-2(1H)-pyridone nucleobase
  modified_base order(19..20,24,26,31..32): mod_base = OTHER; note = 2-Prime-Fluoro modified nucleoside
  modified_base order(1..18,21..23,25,30): mod_base = OTHER; note = 2-Prime-O-Methyl modified nucleoside
  modified_base order(1^2,31^32): mod_base = OTHER; note = (1,3-dimethylimidazolidin-2-ylidene) Phosphoramidate linkage
  modified_base order(2..29,30^31): mod_base = OTHER; note = Phosphorothioate linkage
  modified_base 29^30: mod_base = OTHER; note = Methylphosphonate linkage
  misc_feature 1..32: note = RM115411

SEQ ID NO: 767 - DNA, 32 bp, synthetic construct; identical to SEQ ID NO: 74
  source 1..32: mol_type = other DNA
  misc_feature 25..26: note = DNA
  misc_feature order(1..24,27..32): note = RNA
  modified_base 24: mod_base = OTHER; note = 2-Prime-O-Methoxyethyl modified 5-methyl Uridine
  modified_base 25: mod_base = OTHER; note = DNA nucleotide carrying a 6-amino-5-nitro-3-yl-2(1H)-pyridone nucleobase
  modified_base order(16..17,21,23,28..29): mod_base = OTHER; note = 2-Prime-Fluoro modified nucleoside
  modified_base order(1..15,18..20,22,27,30..32): mod_base = OTHER; note = 2-Prime-O-Methyl modified nucleoside
  modified_base order(1^2,31^32): mod_base = OTHER; note = (1,3-dimethylimidazolidin-2-ylidene) Phosphoramidate linkage
  modified_base order(2..26,27..31): mod_base = OTHER; note = Phosphorothioate linkage
  modified_base 26^27: mod_base = OTHER; note = Methylphosphonate linkage
  misc_feature 1..32: note = RM115412

SEQ ID NO: 768 - DNA, 32 bp, synthetic construct; identical to SEQ ID NO: 75
  source 1..32: mol_type = other DNA
  misc_feature 22..23: note = DNA
  misc_feature order(1..21,24..32): note = RNA
  modified_base 21: mod_base = OTHER; note = 2-Prime-O-Methoxyethyl modified 5-methyl Uridine
  modified_base 22: mod_base = OTHER; note = DNA nucleotide carrying a 6-amino-5-nitro-3-yl-2(1H)-pyridone nucleobase
  modified_base order(13..14,18,20,25..26): mod_base = OTHER; note = 2-Prime-Fluoro modified nucleoside
  modified_base order(1..12,15..17,19,24,27..32): mod_base = OTHER; note = 2-Prime-O-Methyl modified nucleoside
  modified_base order(1^2,31^32): mod_base = OTHER; note = (1,3-dimethylimidazolidin-2-ylidene) Phosphoramidate linkage
  modified_base order(2..23,24..31): mod_base = OTHER; note = Phosphorothioate linkage
  modified_base 23^24: mod_base = OTHER; note = Methylphosphonate linkage
  misc_feature 1..32: note = RM115413

SEQ ID NO: 769 - DNA, 32 bp, synthetic construct; identical to SEQ ID NO: 76
  source 1..32: mol_type = other DNA
  misc_feature 19..20: note = DNA
  misc_feature order(1..18,21..32): note = RNA
  modified_base 18: mod_base = OTHER; note = 2-Prime-O-Methoxyethyl modified 5-methyl Uridine
  modified_base 19: mod_base = OTHER; note = DNA nucleotide carrying a 6-amino-5-nitro-3-yl-2(1H)-pyridone nucleobase
  modified_base order(10..11,15,17,22..23): mod_base = OTHER; note = 2-Prime-Fluoro modified nucleoside
  modified_base order(1..9,12..14,16,21,24..32): mod_base = OTHER; note = 2-Prime-O-Methyl modified nucleoside
  modified_base order(1^2,31^32): mod_base = OTHER; note = (1,3-dimethylimidazolidin-2-ylidene) Phosphoramidate linkage
  modified_base order(2..20,21..31): mod_base = OTHER; note = Phosphorothioate linkage
  modified_base 20^21: mod_base = OTHER; note = Methylphosphonate linkage
  misc_feature 1..32: note = RM115414

SEQ ID NO: 770 - DNA, 32 bp, synthetic construct; identical to SEQ ID NO: 77
  source 1..32: mol_type = other DNA
  misc_feature 16..17: note = DNA
  misc_feature order(1..15,18..32): note = RNA
  modified_base 15: mod_base = OTHER; note = 2-Prime-O-Methoxyethyl modified 5-methyl Uridine
  modified_base 16: mod_base = OTHER; note = DNA nucleotide carrying a 6-amino-5-nitro-3-yl-2(1H)-pyridone nucleobase
  modified_base order(7..8,12,14,19..20): mod_base = OTHER; note = 2-Prime-Fluoro modified nucleoside
  modified_base order(1..6,9..11,13,18,21..32): mod_base = OTHER; note = 2-Prime-O-Methyl modified nucleoside
  modified_base order(1^2,31^32): mod_base = OTHER; note = (1,3-dimethylimidazolidin-2-ylidene) Phosphoramidate linkage
  modified_base order(2..17,18..31): mod_base = OTHER; note = Phosphorothioate linkage
  modified_base 17^18: mod_base = OTHER; note = Methylphosphonate linkage
  misc_feature 1..32: note = RM115415

SEQ ID NO: 771 - DNA, 32 bp, synthetic construct; identical to SEQ ID NO: 78
  source 1..32: mol_type = other DNA
  misc_feature 13..14: note = DNA
  misc_feature order(1..12,15..32): note = RNA
  modified_base 12: mod_base = OTHER; note = 2-Prime-O-Methoxyethyl modified 5-methyl Uridine
  modified_base 13: mod_base = OTHER; note = DNA nucleotide carrying a 6-amino-5-nitro-3-yl-2(1H)-pyridone nucleobase
  modified_base order(4..5,9,11,16..17): mod_base = OTHER; note = 2-Prime-Fluoro modified nucleoside
  modified_base order(1..3,6..8,10,15,18..32): mod_base = OTHER; note = 2-Prime-O-Methyl modified nucleoside
  modified_base order(1^2,31^32): mod_base = OTHER; note = (1,3-dimethylimidazolidin-2-ylidene) Phosphoramidate linkage
  modified_base order(2..14,15..31): mod_base = OTHER; note = Phosphorothioate linkage
  modified_base 14^15: mod_base = OTHER; note = Methylphosphonate linkage
  misc_feature 1..32: note = RM115416

SEQ ID NO: 772 - DNA, 32 bp, synthetic construct; identical to SEQ ID NO: 79
  source 1..32: mol_type = other DNA
  misc_feature 10..11: note = DNA
  misc_feature order(1..9,12..32): note = RNA
  modified_base 9: mod_base = OTHER; note = 2-Prime-O-Methoxyethyl modified 5-methyl Uridine
  modified_base 10: mod_base = OTHER; note = DNA nucleotide carrying a 6-amino-5-nitro-3-yl-2(1H)-pyridone nucleobase
  modified_base order(1..2,6,8,13..14): mod_base = OTHER; note = 2-Prime-Fluoro modified nucleoside
  modified_base order(3..5,7,12,15..32): mod_base = OTHER; note = 2-Prime-O-Methyl modified nucleoside
  modified_base order(1^2,31^32): mod_base = OTHER; note = (1,3-dimethylimidazolidin-2-ylidene) Phosphoramidate linkage
  modified_base order(2..11,12..31): mod_base = OTHER; note = Phosphorothioate linkage
  modified_base 11^12: mod_base = OTHER; note = Methylphosphonate linkage
  misc_feature 1..32: note = RM115417

SEQ ID NO: 773 - DNA, 32 bp, synthetic construct; identical to SEQ ID NO: 73
  source 1..32: mol_type = other DNA
  misc_feature 28..29: note = DNA
  misc_feature order(1..27,30..32): note = RNA
  modified_base 27: mod_base = OTHER; note = 2-Prime-O-Methoxyethyl modified 5-methyl Uridine
  modified_base 28: mod_base = OTHER; note = DNA nucleotide carrying a 6-amino-5-nitro-3-yl-2(1H)-pyridone nucleobase
  modified_base order(26,31..32): mod_base = OTHER; note = 2-Prime-Fluoro modified nucleoside
  modified_base order(1..25,30): mod_base = OTHER; note = 2-Prime-O-Methyl modified nucleoside
  modified_base order(1^2,31^32): mod_base = OTHER; note = (1,3-dimethylimidazolidin-2-ylidene) Phosphoramidate linkage
  modified_base order(2..29,30^31): mod_base = OTHER; note = Phosphorothioate linkage
  modified_base 29^30: mod_base = OTHER; note = Methylphosphonate linkage
  misc_feature 1..32: note = RM115418

SEQ ID NO: 774 - DNA, 32 bp, synthetic construct; identical to SEQ ID NO: 74
  source 1..32: mol_type = other DNA
  misc_feature 25..26: note = DNA
  misc_feature order(1..24,27..32): note = RNA
  modified_base 24: mod_base = OTHER; note = 2-Prime-O-Methoxyethyl modified 5-methyl Uridine
  modified_base 25: mod_base = OTHER; note = DNA nucleotide carrying a 6-amino-5-nitro-3-yl-2(1H)-pyridone nucleobase
  modified_base order(23,28..29): mod_base = OTHER; note = 2-Prime-Fluoro modified nucleoside
  modified_base order(1..22,27,30..32): mod_base = OTHER; note = 2-Prime-O-Methyl modified nucleoside
  modified_base order(1^2,31^32): mod_base = OTHER; note = (1,3-dimethylimidazolidin-2-ylidene) Phosphoramidate linkage
  modified_base order(2..26,27..31): mod_base = OTHER; note = Phosphorothioate linkage
  modified_base 26^27: mod_base = OTHER; note = Methylphosphonate linkage
  misc_feature 1..32: note = RM115419

SEQ ID NO: 775 - DNA, 32 bp, synthetic construct; identical to SEQ ID NO: 75
  source 1..32: mol_type = other DNA
  misc_feature 22..23: note = DNA
  misc_feature order(1..21,24..32): note = RNA
  modified_base 21: mod_base = OTHER; note = 2-Prime-O-Methoxyethyl modified 5-methyl Uridine
  modified_base 22: mod_base = OTHER; note = DNA nucleotide carrying a 6-amino-5-nitro-3-yl-2(1H)-pyridone nucleobase
  modified_base order(20,25..26): mod_base = OTHER; note = 2-Prime-Fluoro modified nucleoside
  modified_base order(1..19,24,27..32): mod_base = OTHER; note = 2-Prime-O-Methyl modified nucleoside
  modified_base order(1^2,31^32): mod_base = OTHER; note = (1,3-dimethylimidazolidin-2-ylidene) Phosphoramidate linkage
  modified_base order(2..23,24..31): mod_base = OTHER; note = Phosphorothioate linkage
  modified_base 23^24: mod_base = OTHER; note = Methylphosphonate linkage
  misc_feature 1..32: note = RM115420

SEQ ID NO: 776 - DNA, 32 bp, synthetic construct; identical to SEQ ID NO: 76
  source 1..32: mol_type = other DNA
  misc_feature 19..20: note = DNA
  misc_feature order(1..18,21..32): note = RNA
  modified_base 18: mod_base = OTHER; note = 2-Prime-O-Methoxyethyl modified 5-methyl Uridine
  modified_base 19: mod_base = OTHER; note = DNA nucleotide carrying a 6-amino-5-nitro-3-yl-2(1H)-pyridone nucleobase
  modified_base order(17,22..23): mod_base = OTHER; note = 2-Prime-Fluoro modified nucleoside
  modified_base order(1..16,21,24..32): mod_base = OTHER; note = 2-Prime-O-Methyl modified nucleoside
  modified_base order(1^2,31^32): mod_base = OTHER; note = (1,3-dimethylimidazolidin-2-ylidene) Phosphoramidate linkage
  modified_base order(2..20,21..31): mod_base = OTHER; note = Phosphorothioate linkage
  modified_base 20^21: mod_base = OTHER; note = Methylphosphonate linkage
  misc_feature 1..32: note = RM115421

SEQ ID NO: 777 - DNA, 32 bp, synthetic construct; identical to SEQ ID NO: 77
  source 1..32: mol_type = other DNA
  misc_feature 16..17: note = DNA
  misc_feature order(1..15,18..32): note = RNA
  modified_base 15: mod_base = OTHER; note = 2-Prime-O-Methoxyethyl modified 5-methyl Uridine
  modified_base 16: mod_base = OTHER; note = DNA nucleotide carrying a 6-amino-5-nitro-3-yl-2(1H)-pyridone nucleobase
  modified_base order(14,19..20): mod_base = OTHER; note = 2-Prime-Fluoro modified nucleoside
  modified_base order(1..13,18,21..32): mod_base = OTHER; note = 2-Prime-O-Methyl modified nucleoside
  modified_base order(1^2,31^32): mod_base = OTHER; note = (1,3-dimethylimidazolidin-2-ylidene) Phosphoramidate linkage
  modified_base order(2..17,18..31): mod_base = OTHER; note = Phosphorothioate linkage
  modified_base 17^18: mod_base = OTHER; note = Methylphosphonate linkage
  misc_feature 1..32: note = RM115422

SEQ ID NO: 778 - DNA, 32 bp, synthetic construct; identical to SEQ ID NO: 78
  source 1..32: mol_type = other DNA
  misc_feature 13..14: note = DNA
  misc_feature order(1..12,15..32): note = RNA
  modified_base 12: mod_base = OTHER; note = 2-Prime-O-Methoxyethyl modified 5-methyl Uridine
  modified_base 13: mod_base = OTHER; note = DNA nucleotide carrying a 6-amino-5-nitro-3-yl-2(1H)-pyridone nucleobase
  modified_base order(11,16..17): mod_base = OTHER; note = 2-Prime-Fluoro modified nucleoside
  modified_base order(1..10,15,18..32): mod_base = OTHER; note = 2-Prime-O-Methyl modified nucleoside
  modified_base order(1^2,31^32): mod_base = OTHER; note = (1,3-dimethylimidazolidin-2-ylidene) Phosphoramidate linkage
  modified_base order(2..14,15..31): mod_base = OTHER; note = Phosphorothioate linkage
  modified_base 14^15: mod_base = OTHER; note = Methylphosphonate linkage
  misc_feature 1..32: note = RM115423

SEQ ID NO: 779 - DNA, 32 bp, synthetic construct; identical to SEQ ID NO: 79
  source 1..32: mol_type = other DNA
  misc_feature 10..11: note = DNA
  misc_feature order(1..9,12..32): note = RNA
  modified_base 9: mod_base = OTHER; note = 2-Prime-O-Methoxyethyl modified 5-methyl Uridine
  modified_base 10: mod_base = OTHER; note = DNA nucleotide carrying a 6-amino-5-nitro-3-yl-2(1H)-pyridone nucleobase
  modified_base order(8,13..14): mod_base = OTHER; note = 2-Prime-Fluoro modified nucleoside
  modified_base order(1..7,12,15..32): mod_base = OTHER; note = 2-Prime-O-Methyl modified nucleoside
  modified_base order(1^2,31^32): mod_base = OTHER; note = (1,3-dimethylimidazolidin-2-ylidene) Phosphoramidate linkage
  modified_base order(2..11,12..31): mod_base = OTHER; note = Phosphorothioate linkage
  modified_base 11^12: mod_base = OTHER; note = Methylphosphonate linkage
  misc_feature 1..32: note = RM115424

SEQ ID NO: 780 - DNA, 32 bp, synthetic construct; identical to SEQ ID NO: 80
  source 1..32: mol_type = other DNA
  misc_feature 7..8: note = DNA
  misc_feature order(1..6,9..32): note = RNA
  modified_base 6: mod_base = OTHER; note = 2-Prime-O-Methoxyethyl modified 5-methyl Uridine
  modified_base 7: mod_base = OTHER; note = DNA nucleotide carrying a 6-amino-5-nitro-3-yl-2(1H)-pyridone nucleobase
  modified_base order(5,10..11): mod_base = OTHER; note = 2-Prime-Fluoro modified nucleoside
  modified_base order(1..4,9,12..32): mod_base = OTHER; note = 2-Prime-O-Methyl modified nucleoside
  modified_base order(1^2,31^32): mod_base = OTHER; note = (1,3-dimethylimidazolidin-2-ylidene) Phosphoramidate linkage
  modified_base order(2..8,9..31): mod_base = OTHER; note = Phosphorothioate linkage
  modified_base 8^9: mod_base = OTHER; note = Methylphosphonate linkage
  misc_feature 1..32: note = RM115425

SEQ ID NO: 781 - DNA, 29 bp, synthetic construct
  source 1..29: mol_type = other DNA
  misc_feature 18..19: note = DNA
  misc_feature order(1..17,20..29): note = RNA
  modified_base 17: mod_base = OTHER; note = 2-Prime-O-Methoxyethyl modified 5-methyl Uridine
  modified_base 18: mod_base = OTHER; note = DNA nucleotide carrying a 6-amino-5-nitro-3-yl-2(1H)-pyridone nucleobase
  modified_base order(4,6,10,13,21..23,27): mod_base = OTHER; note = 2-Prime-Fluoro modified nucleoside
  modified_base order(1..3,5,7..9,11..12,14..16,20,24..26,28..29): mod_base = OTHER; note = 2-Prime-O-Methyl modified nucleoside
  modified_base order(1^2,28^29): mod_base = OTHER; note = (1,3-dimethylimidazolidin-2-ylidene) Phosphoramidate linkage
  modified_base order(2..19,20..28): mod_base = OTHER; note = Phosphorothioate linkage
  modified_base 19^20: mod_base = OTHER; note = Methylphosphonate linkage
  misc_feature 1..29: note = RM115426
aatttggcccttcgtctnatggacaaagt

SEQ ID NO: 782 - DNA, 29 bp, synthetic construct
  source 1..29: mol_type = other DNA
  misc_feature 15..16: note = DNA
  misc_feature order(1..14,17..29): note = RNA
  modified_base 14: mod_base = OTHER; note = 2-Prime-O-Methoxyethyl modified 5-methyl Uridine
  modified_base 15: mod_base = OTHER; note = DNA nucleotide carrying a 6-amino-5-nitro-3-yl-2(1H)-pyridone nucleobase
  modified_base order(1,3,7,10,18..20,24): mod_base = OTHER; note = 2-Prime-Fluoro modified nucleoside
  modified_base order(2,4..6,8..9,11..13,17,21..23,25..29): mod_base = OTHER; note = 2-Prime-O-Methyl modified nucleoside
  modified_base order(1^2,28^29): mod_base = OTHER; note = (1,3-dimethylimidazolidin-2-ylidene) Phosphoramidate linkage
  modified_base order(2..16,17..28): mod_base = OTHER; note = Phosphorothioate linkage
  modified_base 16^17: mod_base = OTHER; note = Methylphosphonate linkage
  misc_feature 1..29: note = RM115427
ttggcccttcgtctnatggacaaagtctt

SEQ ID NO: 783 - DNA, 29 bp, synthetic construct
  source 1..29: mol_type = other DNA
  misc_feature 12..13: note = DNA
  misc_feature order(1..11,14..29): note = RNA
  modified_base 11: mod_base = OTHER; note = 2-Prime-O-Methoxyethyl modified 5-methyl Uridine
  modified_base 12: mod_base = OTHER; note = DNA nucleotide carrying a 6-amino-5-nitro-3-yl-2(1H)-pyridone nucleobase
  modified_base order(5,9..10,15,19,22,26,28): mod_base = OTHER; note = 2-Prime-Fluoro modified nucleoside
  modified_base order(1..4,6..8,14,16..18,20..21,23..25,27,29): mod_base = OTHER; note = 2-Prime-O-Methyl modified nucleoside
  modified_base order(1^2,28^29): mod_base = OTHER; note = (1,3-dimethylimidazolidin-2-ylidene) Phosphoramidate linkage
  modified_base order(2..13,14..28): mod_base = OTHER; note = Phosphorothioate linkage
  modified_base 13^14: mod_base = OTHER; note = Methylphosphonate linkage
  misc_feature 1..29: note = RM115428
gcccttcgtctnatggacaaagtctttaa

SEQ ID NO: 784 - DNA, 29 bp, synthetic construct
  source 1..29: mol_type = other DNA
  misc_feature 9..10: note = DNA
  misc_feature order(1..8,11..29): note = RNA
  modified_base 8: mod_base = OTHER; note = 2-Prime-O-Methoxyethyl modified 5-methyl Uridine
  modified_base 9: mod_base = OTHER; note = DNA nucleotide carrying a 6-amino-5-nitro-3-yl-2(1H)-pyridone nucleobase
  modified_base order(2,6..7,12,16,19,23,25): mod_base = OTHER; note = 2-Prime-Fluoro modified nucleoside
  modified_base order(1,3..5,11,13..15,17..18,20..22,24,26..29): mod_base = OTHER; note = 2-Prime-O-Methyl modified nucleoside
  modified_base order(1^2,28^29): mod_base = OTHER; note = (1,3-dimethylimidazolidin-2-ylidene) Phosphoramidate linkage
  modified_base order(2..10,11..28): mod_base = OTHER; note = Phosphorothioate linkage
  modified_base 10^11: mod_base = OTHER; note = Methylphosphonate linkage
  misc_feature 1..29: note = RM115429
cttcgtctnatggacaaagtctttaagac

SEQ ID NO: 785 - DNA, 26 bp, synthetic construct
  source 1..26: mol_type = other DNA
  misc_feature 19..20: note = DNA
  misc_feature order(1..18,21..26): note = RNA
  modified_base 18: mod_base = OTHER; note = 2-Prime-O-Methoxyethyl modified 5-methyl Uridine
  modified_base 19: mod_base = OTHER; note = DNA nucleotide carrying a 6-amino-5-nitro-3-yl-2(1H)-pyridone nucleobase
  modified_base order(11,14,22..24): mod_base = OTHER; note = 2-Prime-Fluoro modified nucleoside
  modified_base order(1..10,12..13,15..17,21,25..26): mod_base = OTHER; note = 2-Prime-O-Methyl modified nucleoside
  modified_base order(1^2,25^26): mod_base = OTHER; note = (1,3-dimethylimidazolidin-2-ylidene) Phosphoramidate linkage
  modified_base order(2..20,21..25): mod_base = OTHER; note = Phosphorothioate linkage
  modified_base 20^21: mod_base = OTHER; note = Methylphosphonate linkage
  misc_feature 1..26: note = RM115430
taatttggcccttcgtctnatggaca

SEQ ID NO: 786 - DNA, 26 bp, synthetic construct
  source 1..26: mol_type = other DNA
  misc_feature 16..17: note = DNA
  misc_feature order(1..15,18..26): note = RNA
  modified_base 15: mod_base = OTHER; note = 2-Prime-O-Methoxyethyl modified 5-methyl Uridine
  modified_base 16: mod_base = OTHER; note = DNA nucleotide carrying a 6-amino-5-nitro-3-yl-2(1H)-pyridone nucleobase
  modified_base order(8,11,19..21): mod_base = OTHER; note = 2-Prime-Fluoro modified nucleoside
  modified_base order(1..7,9..10,12..14,18,22..26): mod_base = OTHER; note = 2-Prime-O-Methyl modified nucleoside
  modified_base order(1^2,25^26): mod_base = OTHER; note = (1,3-dimethylimidazolidin-2-ylidene) Phosphoramidate linkage
  modified_base order(2..17,18..25): mod_base = OTHER; note = Phosphorothioate linkage
  modified_base 17^18: mod_base = OTHER; note = Methylphosphonate linkage
  misc_feature 1..26: note = RM115431
tttggcccttcgtctnatggacaaag

SEQ ID NO: 787 - DNA, 26 bp, synthetic construct
  source 1..26: mol_type = other DNA
  misc_feature 13..14: note = DNA
  misc_feature order(1..12,15..26): note = RNA
  modified_base 12: mod_base = OTHER; note = 2-Prime-O-Methoxyethyl modified 5-methyl Uridine
  modified_base 13: mod_base = OTHER; note = DNA nucleotide carrying a 6-amino-5-nitro-3-yl-2(1H)-pyridone nucleobase
  modified_base order(5,8,16..18): mod_base = OTHER; note = 2-Prime-Fluoro modified nucleoside
  modified_base order(1..4,6..7,9..11,15,19..26): mod_base = OTHER; note = 2-Prime-O-Methyl modified nucleoside
  modified_base order(1^2,25^26): mod_base = OTHER; note = (1,3-dimethylimidazolidin-2-ylidene) Phosphoramidate linkage
  modified_base order(2..14,15..25): mod_base = OTHER; note = Phosphorothioate linkage
  modified_base 14^15: mod_base = OTHER; note = Methylphosphonate linkage
  misc_feature 1..26: note = RM115432
ggcccttcgtctnatggacaaagtct

SEQ ID NO: 788 - DNA, 26 bp, synthetic construct
  source 1..26: mol_type = other DNA
  misc_feature 10..11: note = DNA
  misc_feature order(1..9,12..26): note = RNA
  modified_base 9: mod_base = OTHER; note = 2-Prime-O-Methoxyethyl modified 5-methyl Uridine
  modified_base 10: mod_base = OTHER; note = DNA nucleotide carrying a 6-amino-5-nitro-3-yl-2(1H)-pyridone nucleobase
  modified_base order(2,5,13..15): mod_base = OTHER; note = 2-Prime-Fluoro modified nucleoside
  modified_base order(1,3..4,6..8,12,16..26): mod_base = OTHER; note = 2-Prime-O-Methyl modified nucleoside
  modified_base order(1^2,25^26): mod_base = OTHER; note = (1,3-dimethylimidazolidin-2-ylidene) Phosphoramidate linkage
  modified_base order(2..11,12..25): mod_base = OTHER; note = Phosphorothioate linkage
  modified_base 11^12: mod_base = OTHER; note = Methylphosphonate linkage
  misc_feature 1..26: note = RM115433
ccttcgtctnatggacaaagtcttta

SEQ ID NO: 789 - DNA, 29 bp, synthetic construct
  source 1..29: mol_type = other DNA
  misc_feature 24..25: note = DNA
  misc_feature order(1..23,26..29): note = RNA
  modified_base 23: mod_base = OTHER; note = 2-Prime-O-Methoxyethyl modified 5-methyl Uridine
  modified_base 24: mod_base = OTHER; note = DNA nucleotide carrying a 6-amino-5-nitro-3-yl-2(1H)-pyridone nucleobase
  modified_base order(16,19,27..29): mod_base = OTHER; note = 2-Prime-Fluoro modified nucleoside
  modified_base order(1..15,17..18,20..22,26): mod_base = OTHER; note = 2-Prime-O-Methyl modified nucleoside
  modified_base order(1^2,28^29): mod_base = OTHER; note = (1,3-dimethylimidazolidin-2-ylidene) Phosphoramidate linkage
  modified_base order(2..25,26..28): mod_base = OTHER; note = Phosphorothioate linkage
  modified_base 25^26: mod_base = OTHER; note = Methylphosphonate linkage
  misc_feature 1..29: note = RM115434
gtcattaatttggcccttcgtctnatgga

SEQ ID NO: 790 - DNA, 29 bp, synthetic construct
  source 1..29: mol_type = other DNA
  misc_feature 21..22: note = DNA
  misc_feature order(1..20,23..29): note = RNA
  modified_base 20: mod_base = OTHER; note = 2-Prime-O-Methoxyethyl modified 5-methyl Uridine
  modified_base 21: mod_base = OTHER; note = DNA nucleotide carrying a 6-amino-5-nitro-3-yl-2(1H)-pyridone nucleobase
  modified_base order(13,16,24..26): mod_base = OTHER; note = 2-Prime-Fluoro modified nucleoside
  modified_base order(1..12,14..15,17..19,23,27..29): mod_base = OTHER; note = 2-Prime-O-Methyl modified nucleoside
  modified_base order(1^2,28^29): mod_base = OTHER; note = (1,3-dimethylimidazolidin-2-ylidene) Phosphoramidate linkage
  modified_base order(2..22,23..28): mod_base = OTHER; note = Phosphorothioate linkage
  modified_base 22^23: mod_base = OTHER; note = Methylphosphonate linkage
  misc_feature 1..29: note = RM115435
attaatttggcccttcgtctnatggacaa

SEQ ID NO: 791 - DNA, 29 bp, synthetic construct
  source 1..29: mol_type = other DNA
  misc_feature 18..19: note = DNA
  misc_feature order(1..17,20..29): note = RNA
  modified_base 17: mod_base = OTHER; note = 2-Prime-O-Methoxyethyl modified 5-methyl Uridine
  modified_base 18: mod_base = OTHER; note = DNA nucleotide carrying a 6-amino-5-nitro-3-yl-2(1H)-pyridone nucleobase
  modified_base order(10,13,21..23): mod_base = OTHER; note = 2-Prime-Fluoro modified nucleoside
  modified_base order(1..9,11..12,14..16,20,24..29): mod_base = OTHER; note = 2-Prime-O-Methyl modified nucleoside
  modified_base order(1^2,28^29): mod_base = OTHER; note = (1,3-dimethylimidazolidin-2-ylidene) Phosphoramidate linkage
  modified_base order(2..19,20..28): mod_base = OTHER; note = Phosphorothioate linkage
  modified_base 19^20: mod_base = OTHER; note = Methylphosphonate linkage
  misc_feature 1..29: note = RM115436
aatttggcccttcgtctnatggacaaagt

SEQ ID NO: 792 - DNA, 29 bp, synthetic construct
  source 1..29: mol_type = other DNA
  misc_feature 15..16: note = DNA
  misc_feature order(1..14,17..29): note = RNA
  modified_base 14: mod_base = OTHER; note = 2-Prime-O-Methoxyethyl modified 5-methyl Uridine
  modified_base 15: mod_base = OTHER; note = DNA nucleotide carrying a 6-amino-5-nitro-3-yl-2(1H)-pyridone nucleobase
  modified_base order(7,10,18..20): mod_base = OTHER; note = 2-Prime-Fluoro modified nucleoside
  modified_base order(1..6,8..9,11..13,17,21..29): mod_base = OTHER; note = 2-Prime-O-Methyl modified nucleoside
  modified_base order(1^2,28^29): mod_base = OTHER; note = (1,3-dimethylimidazolidin-2-ylidene) Phosphoramidate linkage
  modified_base order(2..16,17..28): mod_base = OTHER; note = Phosphorothioate linkage
  modified_base 16^17: mod_base = OTHER; note = Methylphosphonate linkage
  misc_feature 1..29: note = RM115437
ttggcccttcgtctnatggacaaagtctt

SEQ ID NO: 793 - DNA, 29 bp, synthetic construct
  source 1..29: mol_type = other DNA
  misc_feature 12..13: note = DNA
  misc_feature order(1..11,14..29): note = RNA
  modified_base 11: mod_base = OTHER; note = 2-Prime-O-Methoxyethyl modified 5-methyl Uridine
  modified_base 12: mod_base = OTHER; note = DNA nucleotide carrying a 6-amino-5-nitro-3-yl-2(1H)-pyridone nucleobase
  modified_base order(4,7,15..17): mod_base = OTHER; note = 2-Prime-Fluoro modified nucleoside
  modified_base order(1..3,5..6,8..10,14,18..29): mod_base = OTHER; note = 2-Prime-O-Methyl modified nucleoside
  modified_base order(1^2,28^29): mod_base = OTHER; note = (1,3-dimethylimidazolidin-2-ylidene) Phosphoramidate linkage
  modified_base order(2..13,14..28): mod_base = OTHER; note = Phosphorothioate linkage
  modified_base 13^14: mod_base = OTHER; note = Methylphosphonate linkage
  misc_feature 1..29: note = RM115438
gcccttcgtctnatggacaaagtctttaa

SEQ ID NO: 794 - DNA, 29 bp, synthetic construct
  source 1..29: mol_type = other DNA
  misc_feature 9..10: note = DNA
  misc_feature order(1..8,11..29): note = RNA
  modified_base 8: mod_base = OTHER; note = 2-Prime-O-Methoxyethyl modified 5-methyl Uridine
  modified_base 9: mod_base = OTHER; note = DNA nucleotide carrying a 6-amino-5-nitro-3-yl-2(1H)-pyridone nucleobase
  modified_base order(1,4,12..14): mod_base = OTHER; note = 2-Prime-Fluoro modified nucleoside
  modified_base order(2..3,5..7,11,15..29): mod_base = OTHER; note = 2-Prime-O-Methyl modified nucleoside
  modified_base order(1^2,28^29): mod_base = OTHER; note = (1,3-dimethylimidazolidin-2-ylidene) Phosphoramidate linkage
  modified_base order(2..10,11..28): mod_base = OTHER; note = Phosphorothioate linkage
  modified_base 10^11: mod_base = OTHER; note = Methylphosphonate linkage
  misc_feature 1..29: note = RM115439
cttcgtctnatggacaaagtctttaagac

SEQ ID NO: 795 - DNA, 26 bp, synthetic construct
  source 1..26: mol_type = other DNA
  misc_feature 16..17: note = DNA
  misc_feature order(1..15,18..26): note = RNA
  modified_base 15: mod_base = OTHER; note = 2-Prime-O-Methoxyethyl modified 5-methyl Uridine
  modified_base 16: mod_base = OTHER; note = DNA nucleotide carrying a 6-amino-5-nitro-3-yl-2(1H)-pyridone nucleobase
  modified_base order(13..14,19,23,26): mod_base = OTHER; note = 2-Prime-Fluoro modified nucleoside
  modified_base order(1..12,18,20..22,24..25): mod_base = OTHER; note = 2-Prime-O-Methyl modified nucleoside
  modified_base order(1^2,25^26): mod_base = OTHER; note = (1,3-dimethylimidazolidin-2-ylidene) Phosphoramidate linkage
  modified_base order(2..17,18..25): mod_base = OTHER; note = Phosphorothioate linkage
  modified_base 17^18: mod_base = OTHER; note = Methylphosphonate linkage
  misc_feature 1..26: note = RM115440
tttggcccttcgtctnatggacaaag

SEQ ID NO: 796 - DNA, 26 bp, synthetic construct
  source 1..26: mol_type = other DNA
  misc_feature 13..14: note = DNA
  misc_feature order(1..12,15..26): note = RNA
  modified_base 12: mod_base = OTHER; note = 2-Prime-O-Methoxyethyl modified 5-methyl Uridine
  modified_base 13: mod_base = OTHER; note = DNA nucleotide carrying a 6-amino-5-nitro-3-yl-2(1H)-pyridone nucleobase
  modified_base order(10..11,16,20,23): mod_base = OTHER; note = 2-Prime-Fluoro modified nucleoside
  modified_base order(1..9,15,17..19,21..22,24..26): mod_base = OTHER; note = 2-Prime-O-Methyl modified nucleoside
  modified_base order(1^2,25^26): mod_base = OTHER; note = (1,3-dimethylimidazolidin-2-ylidene) Phosphoramidate linkage
  modified_base order(2..14,15..25): mod_base = OTHER; note = Phosphorothioate linkage
  modified_base 14^15: mod_base = OTHER; note = Methylphosphonate linkage
  misc_feature 1..26: note = RM115441
ggcccttcgtctnatggacaaagtct

SEQ ID NO: 797 - DNA, 26 bp, synthetic construct
  source 1..26: mol_type = other DNA
  misc_feature 10..11: note = DNA
  misc_feature order(1..9,12..26): note = RNA
  modified_base 9: mod_base = OTHER; note = 2-Prime-O-Methoxyethyl modified 5-methyl Uridine
  modified_base 10: mod_base = OTHER; note = DNA nucleotide carrying a 6-amino-5-nitro-3-yl-2(1H)-pyridone nucleobase
  modified_base order(7..8,13,17,20): mod_base = OTHER; note = 2-Prime-Fluoro modified nucleoside
  modified_base order(1..6,12,14..16,18..19,21..26): mod_base = OTHER; note = 2-Prime-O-Methyl modified nucleoside
  modified_base order(1^2,25^26): mod_base = OTHER; note = (1,3-dimethylimidazolidin-2-ylidene) Phosphoramidate linkage
  modified_base order(2..11,12..25): mod_base = OTHER; note = Phosphorothioate linkage
  modified_base 11^12: mod_base = OTHER; note = Methylphosphonate linkage
  misc_feature 1..26: note = RM115442
ccttcgtctnatggacaaagtcttta

SEQ ID NO: 798 - DNA, 26 bp, synthetic construct
  source 1..26: mol_type = other DNA
  misc_feature 7..8: note = DNA
  misc_feature order(1..6,9..26): note = RNA
  modified_base 6: mod_base = OTHER; note = 2-Prime-O-Methoxyethyl modified 5-methyl Uridine
  modified_base 7: mod_base = OTHER; note = DNA nucleotide carrying a 6-amino-5-nitro-3-yl-2(1H)-pyridone nucleobase
  modified_base order(4..5,10,14,17): mod_base = OTHER; note = 2-Prime-Fluoro modified nucleoside
  modified_base order(1..3,9,11..13,15..16,18..26): mod_base = OTHER; note = 2-Prime-O-Methyl modified nucleoside
  modified_base order(1^2,25^26): mod_base = OTHER; note = (1,3-dimethylimidazolidin-2-ylidene) Phosphoramidate linkage
  modified_base order(2..8,9..25): mod_base = OTHER; note = Phosphorothioate linkage
  modified_base 8^9: mod_base = OTHER; note = Methylphosphonate linkage
  misc_feature 1..26: note = RM115443
tcgtctnatggacaaagtctttaaga

SEQ ID NO: 799 - DNA, 29 bp, synthetic construct
  source 1..29: mol_type = other DNA
  misc_feature 18..19: note = DNA
  misc_feature order(1..17,20..29): note = RNA
  modified_base 17: mod_base = OTHER; note = 2-Prime-O-Methoxyethyl modified 5-methyl Uridine
  modified_base 18: mod_base = OTHER; note = DNA nucleotide carrying a 6-amino-5-nitro-3-yl-2(1H)-pyridone nucleobase
  modified_base order(15..16,21,25,28): mod_base = OTHER; note = 2-Prime-Fluoro modified nucleoside
  modified_base order(1..14,20,22..24,26..27,29): mod_base = OTHER; note = 2-Prime-O-Methyl modified nucleoside
  modified_base order(1^2,28^29): mod_base = OTHER; note = (1,3-dimethylimidazolidin-2-ylidene) Phosphoramidate linkage
  modified_base order(2..19,20..28): mod_base = OTHER; note = Phosphorothioate linkage
  modified_base 19^20: mod_base = OTHER; note = Methylphosphonate linkage
  misc_feature 1..29: note = RM115444
aatttggcccttcgtctnatggacaaagt

SEQ ID NO: 800 - DNA, 29 bp, synthetic construct
  source 1..29: mol_type = other DNA
  misc_feature 15..16: note = DNA
  misc_feature order(1..14,17..29): note = RNA
  modified_base 14: mod_base = OTHER; note = 2-Prime-O-Methoxyethyl modified 5-methyl Uridine
  modified_base 15: mod_base = OTHER; note = DNA nucleotide carrying a 6-amino-5-nitro-3-yl-2(1H)-pyridone nucleobase
  modified_base order(12..13,18,22,25): mod_base = OTHER; note = 2-Prime-Fluoro modified nucleoside
  modified_base order(1..11,17,19..21,23..24,26..29): mod_base = OTHER; note = 2-Prime-O-Methyl modified nucleoside
  modified_base order(1^2,28^29): mod_base = OTHER; note = (1,3-dimethylimidazolidin-2-ylidene) Phosphoramidate linkage
  modified_base order(2..16,17..28): mod_base = OTHER; note = Phosphorothioate linkage
  modified_base 16^17: mod_base = OTHER; note = Methylphosphonate linkage
  misc_feature 1..29: note = RM115445
ttggcccttcgtctnatggacaaagtctt

SEQ ID NO: 801 - DNA, 29 bp, synthetic construct
  source 1..29: mol_type = other DNA
  misc_feature 12..13: note = DNA
  misc_feature order(1..11,14..29): note = RNA
  modified_base 11: mod_base = OTHER; note = 2-Prime-O-Methoxyethyl modified 5-methyl Uridine
  modified_base 12: mod_base = OTHER; note = DNA nucleotide carrying a 6-amino-5-nitro-3-yl-2(1H)-pyridone nucleobase
  modified_base order(9..10,15,19,22): mod_base = OTHER; note = 2-Prime-Fluoro modified nucleoside
  modified_base order(1..8,14,16..18,20..21,23..29): mod_base = OTHER; note = 2-Prime-O-Methyl modified nucleoside
  modified_base order(1^2,28^29): mod_base = OTHER; note = (1,3-dimethylimidazolidin-2-ylidene) Phosphoramidate linkage
  modified_base order(2..13,14..28): mod_base = OTHER; note = Phosphorothioate linkage
  modified_base 13^14: mod_base = OTHER; note = Methylphosphonate linkage
  misc_feature 1..29: note = RM115446
gcccttcgtctnatggacaaagtctttaa

SEQ ID NO: 802 - DNA, 29 bp, synthetic construct
  source 1..29: mol_type = other DNA
  misc_feature 9..10: note = DNA
  misc_feature order(1..8,11..29): note = RNA
  modified_base 8: mod_base = OTHER; note = 2-Prime-O-Methoxyethyl modified 5-methyl Uridine
  modified_base 9: mod_base = OTHER; note = DNA nucleotide carrying a 6-amino-5-nitro-3-yl-2(1H)-pyridone nucleobase
  modified_base order(6..7,12,16,19): mod_base = OTHER; note = 2-Prime-Fluoro modified nucleoside
  modified_base order(1..5,11,13..15,17..18,20..29): mod_base = OTHER; note = 2-Prime-O-Methyl modified nucleoside
  modified_base order(1^2,28^29): mod_base = OTHER; note = (1,3-dimethylimidazolidin-2-ylidene) Phosphoramidate linkage
  modified_base order(2..10,11..28): mod_base = OTHER; note = Phosphorothioate linkage
  modified_base 10^11: mod_base = OTHER; note = Methylphosphonate linkage
  misc_feature 1..29: note = RM115447
cttcgtctnatggacaaagtctttaagac

SEQ ID NO: 803 - DNA, 29 bp, synthetic construct
  source 1..29: mol_type = other DNA
  misc_feature 6..7: note = DNA
  misc_feature order(1..5,8..29): note = RNA
  modified_base 5: mod_base = OTHER; note = 2-Prime-O-Methoxyethyl modified 5-methyl Uridine
  modified_base 6: mod_base = OTHER; note = DNA nucleotide carrying a 6-amino-5-nitro-3-yl-2(1H)-pyridone nucleobase
  modified_base order(3..4,9,13,16): mod_base = OTHER; note = 2-Prime-Fluoro modified nucleoside
  modified_base order(1..2,8,10..12,14..15,17..29): mod_base = OTHER; note = 2-Prime-O-Methyl modified nucleoside
  modified_base order(1^2,28^29): mod_base = OTHER; note = (1,3-dimethylimidazolidin-2-ylidene) Phosphoramidate linkage
  modified_base order(2..7,8..28): mod_base = OTHER; note = Phosphorothioate linkage
  modified_base 7^8: mod_base = OTHER; note = Methylphosphonate linkage
  misc_feature 1..29: note = RM115448
cgtctnatggacaaagtctttaagaccat

SEQ ID NO: 804 - DNA, 32 bp, synthetic construct; identical to SEQ ID NO: 73
  source 1..32: mol_type = other DNA
  misc_feature 28..29: note = DNA
  misc_feature order(1..27,30..32): note = RNA
  modified_base 27: mod_base = OTHER; note = 2-Prime-O-Methoxyethyl modified 5-methyl Uridine
  modified_base 28: mod_base = OTHER; note = DNA nucleotide carrying a 6-amino-5-nitro-3-yl-2(1H)-pyridone nucleobase
  modified_base order(8,12,15..16,23,31): mod_base = OTHER; note = 2-Prime-Fluoro modified nucleoside
  modified_base order(1..7,9..11,13..14,17..22,24..26,30,32): mod_base = OTHER; note = 2-Prime-O-Methyl modified nucleoside
  modified_base order(1^2,31^32): mod_base = OTHER; note = (1,3-dimethylimidazolidin-2-ylidene) Phosphoramidate linkage
  modified_base order(2..29,30^31): mod_base = OTHER; note = Phosphorothioate linkage
  modified_base 29^30: mod_base = OTHER; note = Methylphosphonate linkage
  misc_feature 1..32: note = RM115449

SEQ ID NO: 805 - DNA, 32 bp, synthetic construct; identical to SEQ ID NO: 74
  source 1..32: mol_type = other DNA
  misc_feature 25..26: note = DNA
  misc_feature order(1..24,27..32): note = RNA
  modified_base 24: mod_base = OTHER; note = 2-Prime-O-Methoxyethyl modified 5-methyl Uridine
  modified_base 25: mod_base = OTHER; note = DNA nucleotide carrying a 6-amino-5-nitro-3-yl-2(1H)-pyridone nucleobase
  modified_base order(5,9,12..13,20,28): mod_base = OTHER; note = 2-Prime-Fluoro modified nucleoside
  modified_base order(1..4,6..8,10..11,14..19,21..23,27,29..32): mod_base = OTHER; note = 2-Prime-O-Methyl modified nucleoside
  modified_base order(1^2,31^32): mod_base = OTHER; note = (1,3-dimethylimidazolidin-2-ylidene) Phosphoramidate linkage
  modified_base order(2..26,27..31): mod_base = OTHER; note = Phosphorothioate linkage
  modified_base 26^27: mod_base = OTHER; note = Methylphosphonate linkage
  misc_feature 1..32: note = RM115450

SEQ ID NO: 806 - DNA, 32 bp, synthetic construct; identical to SEQ ID NO: 75
  source 1..32: mol_type = other DNA
  misc_feature 22..23: note = DNA
  misc_feature order(1..21,24..32): note = RNA
  modified_base 21: mod_base = OTHER; note = 2-Prime-O-Methoxyethyl modified 5-methyl Uridine
  modified_base 22: mod_base = OTHER; note = DNA nucleotide carrying a 6-amino-5-nitro-3-yl-2(1H)-pyridone nucleobase
  modified_base order(2,6,9..10,17,25): mod_base = OTHER; note = 2-Prime-Fluoro modified nucleoside
  modified_base order(1,3..5,7..8,11..16,18..20,24,26..32): mod_base = OTHER; note = 2-Prime-O-Methyl modified nucleoside
  modified_base order(1^2,31^32): mod_base = OTHER; note = (1,3-dimethylimidazolidin-2-ylidene) Phosphoramidate linkage
  modified_base order(2..23,24..31): mod_base = OTHER; note = Phosphorothioate linkage
  modified_base 23^24: mod_base = OTHER; note = Methylphosphonate linkage
  misc_feature 1..32: note = RM115451

SEQ ID NO: 807 - DNA, 23 bp, synthetic construct
  source 1..23: mol_type = other DNA
  misc_feature 18..19: note = DNA
  misc_feature order(1..17,20..23): note = RNA
  modified_base 17: mod_base = OTHER; note = 2-Prime-O-Methoxyethyl modified 5-methyl Uridine
  modified_base 18: mod_base = OTHER; note = DNA nucleotide carrying a 6-amino-5-nitro-3-yl-2(1H)-pyridone nucleobase
  modified_base order(5..6,13,21): mod_base = OTHER; note = 2-Prime-Fluoro modified nucleoside
  modified_base order(1..4,7..12,14..16,20,22..23): mod_base = OTHER; note = 2-Prime-O-Methyl modified nucleoside
  modified_base order(1^2,22^23): mod_base = OTHER; note = (1,3-dimethylimidazolidin-2-ylidene) Phosphoramidate linkage
  modified_base order(2..19,20..22): mod_base = OTHER; note = Phosphorothioate linkage
  modified_base 19^20: mod_base = OTHER; note = Methylphosphonate linkage
  misc_feature 1..23: note = RM115452
aatttggcccttcgtctnatgga

SEQ ID NO: 808 - DNA, 23 bp, synthetic construct
  source 1..23: mol_type = other DNA
  misc_feature 15..16: note = DNA
  misc_feature order(1..14,17..23): note = RNA
  modified_base 14: mod_base = OTHER; note = 2-Prime-O-Methoxyethyl modified 5-methyl Uridine
  modified_base 15: mod_base = OTHER; note = DNA nucleotide carrying a 6-amino-5-nitro-3-yl-2(1H)-pyridone nucleobase
  modified_base order(2..3,10,18): mod_base = OTHER; note = 2-Prime-Fluoro modified nucleoside
  modified_base order(1,4..9,11..13,17,19..23): mod_base = OTHER; note = 2-Prime-O-Methyl modified nucleoside
  modified_base order(1^2,22^23): mod_base = OTHER; note = (1,3-dimethylimidazolidin-2-ylidene) Phosphoramidate linkage
  modified_base order(2..16,17..22): mod_base = OTHER; note = Phosphorothioate linkage
  modified_base 16^17: mod_base = OTHER; note = Methylphosphonate linkage
  misc_feature 1..23: note = RM115453
ttggcccttcgtctnatggacaa

SEQ ID NO: 809 - DNA, 32 bp, synthetic construct; identical to SEQ ID NO: 76
  source 1..32: mol_type = other DNA
  misc_feature 19..20: note = DNA
  misc_feature order(1..18,21..32): note = RNA
  modified_base 18: mod_base = OTHER; note = 2-Prime-O-Methoxyethyl modified 5-methyl Uridine
  modified_base 19: mod_base = OTHER; note = DNA nucleotide carrying a 6-amino-5-nitro-3-yl-2(1H)-pyridone nucleobase
  modified_base order(6,9,12..13,17,22,27,30..31): mod_base = OTHER; note = 2-Prime-Fluoro modified nucleoside
  modified_base order(1..5,7..8,10..11,14..16,21,23..26,28..29,32): mod_base = OTHER; note = 2-Prime-O-Methyl modified nucleoside
  modified_base order(1^2,31^32): mod_base = OTHER; note = (1,3-dimethylimidazolidin-2-ylidene) Phosphoramidate linkage
  modified_base order(2..20,21..31): mod_base = OTHER; note = Phosphorothioate linkage
  modified_base 20^21: mod_base = OTHER; note = Methylphosphonate linkage
  misc_feature 1..32: note = RM115454

SEQ ID NO: 810 - DNA, 32 bp, synthetic construct; identical to SEQ ID NO: 77
  source 1..32: mol_type = other DNA
  misc_feature 16..17: note = DNA
  misc_feature order(1..15,18..32): note = RNA
  modified_base 15: mod_base = OTHER; note = 2-Prime-O-Methoxyethyl modified 5-methyl Uridine
  modified_base 16: mod_base = OTHER; note = DNA nucleotide carrying a 6-amino-5-nitro-3-yl-2(1H)-pyridone nucleobase
  modified_base order(3,6,9..10,14,19,24,27..28): mod_base = OTHER; note = 2-Prime-Fluoro modified nucleoside
  modified_base order(1..2,4..5,7..8,11..13,18,20..23,25..26,29..32): mod_base = OTHER; note = 2-Prime-O-Methyl modified nucleoside
  modified_base order(1^2,31^32): mod_base = OTHER; note = (1,3-dimethylimidazolidin-2-ylidene) Phosphoramidate linkage
  modified_base order(2..17,18..31): mod_base = OTHER; note = Phosphorothioate linkage
  modified_base 17^18: mod_base = OTHER; note = Methylphosphonate linkage
  misc_feature 1..32: note = RM115455

SEQ ID NO: 811 - DNA, 32 bp, synthetic construct; identical to SEQ ID NO: 77
  source 1..32: mol_type = other DNA
  misc_feature 16..17: note = DNA
  misc_feature order(1..15,18..32): note = RNA
  modified_base 15: mod_base = OTHER; note = 2-Prime-O-Methoxyethyl modified 5-methyl Uridine
  modified_base 16: mod_base = OTHER; note = DNA nucleotide carrying a 6-amino-5-nitro-3-yl-2(1H)-pyridone nucleobase
  modified_base order(6..7,10,19..20,24..25,28,31): mod_base = OTHER; note = 2-Prime-Fluoro modified nucleoside
  modified_base order(1..5,8..9,11..14,18,21..23,26..27,29..30,32): mod_base = OTHER; note = 2-Prime-O-Methyl modified nucleoside
  modified_base order(1^2,31^32): mod_base = OTHER; note = (1,3-dimethylimidazolidin-2-ylidene) Phosphoramidate linkage
  modified_base order(2..17,18..31): mod_base = OTHER; note = Phosphorothioate linkage
  modified_base 17^18: mod_base = OTHER; note = Methylphosphonate linkage
  misc_feature 1..32: note = RM115456

SEQ ID NO: 812 - DNA, 32 bp, synthetic construct; identical to SEQ ID NO: 78
  source 1..32: mol_type = other DNA
  misc_feature 13..14: note = DNA
  misc_feature order(1..12,15..32): note = RNA
  modified_base 12: mod_base = OTHER; note = 2-Prime-O-Methoxyethyl modified 5-methyl Uridine
  modified_base 13: mod_base = OTHER; note = DNA nucleotide carrying a 6-amino-5-nitro-3-yl-2(1H)-pyridone nucleobase
  modified_base order(3..4,7,16..17,21..22,25,28): mod_base = OTHER; note = 2-Prime-Fluoro modified nucleoside
  modified_base order(1..2,5..6,8..11,15,18..20,23..24,26..27,29..32): mod_base = OTHER; note = 2-Prime-O-Methyl modified nucleoside
  modified_base order(1^2,31^32): mod_base = OTHER; note = (1,3-dimethylimidazolidin-2-ylidene) Phosphoramidate linkage
  modified_base order(2..14,15..31): mod_base = OTHER; note = Phosphorothioate linkage
  modified_base 14^15: mod_base = OTHER; note = Methylphosphonate linkage
  misc_feature 1..32: note = RM115457

SEQ ID NO: 813 - DNA, 23 bp, synthetic construct
  source 1..23: mol_type = other DNA
  misc_feature 15..16: note = DNA
  misc_feature order(1..14,17..23): note = RNA
  modified_base 14: mod_base = OTHER; note = 2-Prime-O-Methoxyethyl modified 5-methyl Uridine
  modified_base 15: mod_base = OTHER; note = DNA nucleotide carrying a 6-amino-5-nitro-3-yl-2(1H)-pyridone nucleobase
  modified_base order(5,8..9,13,18,23): mod_base = OTHER; note = 2-Prime-Fluoro modified nucleoside
  modified_base order(1..4,6..7,10..12,17,19..22): mod_base = OTHER; note = 2-Prime-O-Methyl modified nucleoside
  modified_base order(1^2,22^23): mod_base = OTHER; note = (1,3-dimethylimidazolidin-2-ylidene) Phosphoramidate linkage
  modified_base order(2..16,17..22): mod_base = OTHER; note = Phosphorothioate linkage
  modified_base 16^17: mod_base = OTHER; note = Methylphosphonate linkage
  misc_feature 1..23: note = RM115458
ttggcccttcgtctnatggacaa

SEQ ID NO: 814 - DNA, 23 bp, synthetic construct
  source 1..23: mol_type = other DNA
  misc_feature 12..13: note = DNA
  misc_feature order(1..11,14..23): note = RNA
  modified_base 11: mod_base = OTHER; note = 2-Prime-O-Methoxyethyl modified 5-methyl Uridine
  modified_base 12: mod_base = OTHER; note = DNA nucleotide carrying a 6-amino-5-nitro-3-yl-2(1H)-pyridone nucleobase
  modified_base order(2,5..6,10,15,20): mod_base = OTHER; note = 2-Prime-Fluoro modified nucleoside
  modified_base order(1,3..4,7..9,14,16..19,21..23): mod_base = OTHER; note = 2-Prime-O-Methyl modified nucleoside
  modified_base order(1^2,22^23): mod_base = OTHER; note = (1,3-dimethylimidazolidin-2-ylidene) Phosphoramidate linkage
  modified_base order(2..13,14..22): mod_base = OTHER; note = Phosphorothioate linkage
  modified_base 13^14: mod_base = OTHER; note = Methylphosphonate linkage
  misc_feature 1..23: note = RM115459
gcccttcgtctnatggacaaagt

SEQ ID NO: 815 - DNA, 32 bp, synthetic construct; identical to SEQ ID NO: 75
  source 1..32: mol_type = other DNA
  misc_feature 22..23: note = DNA
  misc_feature order(1..21,24..32): note = RNA
  modified_base 21: mod_base = OTHER; note = 2-Prime-O-Methoxyethyl modified 5-methyl Uridine
  modified_base 22: mod_base = OTHER; note = DNA nucleotide carrying a 6-amino-5-nitro-3-yl-2(1H)-pyridone nucleobase
  modified_base order(12,15..16,20,25,30): mod_base = OTHER; note = 2-Prime-Fluoro modified nucleoside
  modified_base order(1..11,13..14,17..19,24,26..29,31..32): mod_base = OTHER; note = 2-Prime-O-Methyl modified nucleoside
  modified_base order(1^2,31^32): mod_base = OTHER; note = (1,3-dimethylimidazolidin-2-ylidene) Phosphoramidate linkage
  modified_base order(2..23,24..31): mod_base = OTHER; note = Phosphorothioate linkage
  modified_base 23^24: mod_base = OTHER; note = Methylphosphonate linkage
  misc_feature 1..32: note = RM115460

SEQ ID NO: 816 - DNA, 32 bp, synthetic construct; identical to SEQ ID NO: 76
  source 1..32: mol_type = other DNA
  misc_feature 19..20: note = DNA
  misc_feature order(1..18,21..32): note = RNA
  modified_base 18: mod_base = OTHER; note = 2-Prime-O-Methoxyethyl modified 5-methyl Uridine
  modified_base 19: mod_base = OTHER; note = DNA nucleotide carrying a 6-amino-5-nitro-3-yl-2(1H)-pyridone nucleobase
  modified_base order(9,12..13,17,22,27): mod_base = OTHER; note = 2-Prime-Fluoro modified nucleoside
  modified_base order(1..8,10..11,14..16,21,23..26,28..32): mod_base = OTHER; note = 2-Prime-O-Methyl modified nucleoside
  modified_base order(1^2,31^32): mod_base = OTHER; note = (1,3-dimethylimidazolidin-2-ylidene) Phosphoramidate linkage
  modified_base order(2..20,21..31): mod_base = OTHER; note = Phosphorothioate linkage
  modified_base 20^21: mod_base = OTHER; note = Methylphosphonate linkage
  misc_feature 1..32: note = RM115461

SEQ ID NO: 817 - DNA, 32 bp, synthetic construct; identical to SEQ ID NO: 77
  source 1..32: mol_type = other DNA
  misc_feature 16..17: note = DNA
  misc_feature order(1..15,18..32): note = RNA
  modified_base 15: mod_base = OTHER; note = 2-Prime-O-Methoxyethyl modified 5-methyl Uridine
  modified_base 16: mod_base = OTHER; note = DNA nucleotide carrying a 6-amino-5-nitro-3-yl-2(1H)-pyridone nucleobase
  modified_base order(6,9..10,14,19,24): mod_base = OTHER; note = 2-Prime-Fluoro modified nucleoside
  modified_base order(1..5,7..8,11..13,18,20..23,25..32): mod_base = OTHER; note = 2-Prime-O-Methyl modified nucleoside
  modified_base order(1^2,31^32): mod_base = OTHER; note = (1,3-dimethylimidazolidin-2-ylidene) Phosphoramidate linkage
  modified_base order(2..17,18..31): mod_base = OTHER; note = Phosphorothioate linkage
  modified_base 17^18: mod_base = OTHER; note = Methylphosphonate linkage
  misc_feature 1..32: note = RM115462

SEQ ID NO: 818 - DNA, 32 bp, synthetic construct; identical to SEQ ID NO: 78
  source 1..32: mol_type = other DNA
  misc_feature 13..14: note = DNA
  misc_feature order(1..12,15..32): note = RNA
  modified_base 12: mod_base = OTHER; note = 2-Prime-O-Methoxyethyl modified 5-methyl Uridine
  modified_base 13: mod_base = OTHER; note = DNA nucleotide carrying a 6-amino-5-nitro-3-yl-2(1H)-pyridone nucleobase
  modified_base order(3,6..7,11,16,21): mod_base = OTHER; note = 2-Prime-Fluoro modified nucleoside
  modified_base order(1..2,4..5,8..10,15,17..20,22..32): mod_base = OTHER; note = 2-Prime-O-Methyl modified nucleoside
  modified_base order(1^2,31^32): mod_base = OTHER; note = (1,3-dimethylimidazolidin-2-ylidene) Phosphoramidate linkage
  modified_base order(2..14,15..31): mod_base = OTHER; note = Phosphorothioate linkage
  modified_base 14^15: mod_base = OTHER; note = Methylphosphonate linkage
  misc_feature 1..32: note = RM115463

SEQ ID NO: 819 - DNA, 23 bp, synthetic construct
  source 1..23: mol_type = other DNA
  misc_feature 9..10: note = DNA
  misc_feature order(1..8,11..23): note = RNA
  modified_base 8: mod_base = OTHER; note = 2-Prime-O-Methoxyethyl modified 5-methyl Uridine
  modified_base 9: mod_base = OTHER; note = DNA nucleotide carrying a 6-amino-5-nitro-3-yl-2(1H)-pyridone nucleobase
  modified_base order(3,12..13,17..18,21): mod_base = OTHER; note = 2-Prime-Fluoro modified nucleoside
  modified_base order(1..2,4..7,11,14..16,19..20,22..23): mod_base = OTHER; note = 2-Prime-O-Methyl modified nucleoside
  modified_base order(1^2,22^23): mod_base = OTHER; note = (1,3-dimethylimidazolidin-2-ylidene) Phosphoramidate linkage
  modified_base order(2..10,11..22): mod_base = OTHER; note = Phosphorothioate linkage
  modified_base 10^11: mod_base = OTHER; note = Methylphosphonate linkage
  misc_feature 1..23: note = RM115464
cttcgtctnatggacaaagtctt

SEQ ID NO: 820 - DNA, 32 bp, synthetic construct; identical to SEQ ID NO: 76
  source 1..32: mol_type = other DNA
  misc_feature 19..20: note = DNA
  misc_feature order(1..18,21..32): note = RNA
  modified_base 18: mod_base = OTHER; note = 2-Prime-O-Methoxyethyl modified 5-methyl Uridine
  modified_base 19: mod_base = OTHER; note = DNA nucleotide carrying a 6-amino-5-nitro-3-yl-2(1H)-pyridone nucleobase
  modified_base order(13,22..23,27..28,31): mod_base = OTHER; note = 2-Prime-Fluoro modified nucleoside
  modified_base order(1..12,14..17,21,24..26,29..30,32): mod_base = OTHER; note = 2-Prime-O-Methyl modified nucleoside
  modified_base order(1^2,31^32): mod_base = OTHER; note = (1,3-dimethylimidazolidin-2-ylidene) Phosphoramidate linkage
  modified_base order(2..20,21..31): mod_base = OTHER; note = Phosphorothioate linkage
  modified_base 20^21: mod_base = OTHER; note = Methylphosphonate linkage
  misc_feature 1..32: note = RM115465

SEQ ID NO: 821 - DNA, 32 bp, synthetic construct; identical to SEQ ID NO: 77
  source 1..32: mol_type = other DNA
  misc_feature 16..17: note = DNA
  misc_feature order(1..15,18..32): note = RNA
  modified_base 15: mod_base = OTHER; note = 2-Prime-O-Methoxyethyl modified 5-methyl Uridine
  modified_base 16: mod_base = OTHER; note = DNA nucleotide carrying a 6-amino-5-nitro-3-yl-2(1H)-pyridone nucleobase
  modified_base order(10,19..20,24..25,28): mod_base = OTHER; note = 2-Prime-Fluoro modified nucleoside
  modified_base order(1..9,11..14,18,21..23,26..27,29..32): mod_base = OTHER; note = 2-Prime-O-Methyl modified nucleoside
  modified_base order(1^2,31^32): mod_base = OTHER; note = (1,3-dimethylimidazolidin-2-ylidene) Phosphoramidate linkage
  modified_base order(2..17,18..31): mod_base = OTHER; note = Phosphorothioate linkage
  modified_base 17^18: mod_base = OTHER; note = Methylphosphonate linkage
  misc_feature 1..32: note = RM115466

SEQ ID NO: 822 - DNA, 32 bp, synthetic construct; identical to SEQ ID NO: 78
  source 1..32: mol_type = other DNA
  misc_feature 13..14: note = DNA
  misc_feature order(1..12,15..32): note = RNA
  modified_base 12: mod_base = OTHER; note = 2-Prime-O-Methoxyethyl modified 5-methyl Uridine
  modified_base 13: mod_base = OTHER; note = DNA nucleotide carrying a 6-amino-5-nitro-3-yl-2(1H)-pyridone nucleobase
  modified_base order(7,16..17,21..22,25): mod_base = OTHER; note = 2-Prime-Fluoro modified nucleoside
  modified_base order(1..6,8..11,15,18..20,23..24,26..32): mod_base = OTHER; note = 2-Prime-O-Methyl modified nucleoside
  modified_base order(1^2,31^32): mod_base = OTHER; note = (1,3-dimethylimidazolidin-2-ylidene) Phosphoramidate linkage
  modified_base order(2..14,15..31): mod_base = OTHER; note = Phosphorothioate linkage
  modified_base 14^15: mod_base = OTHER; note = Methylphosphonate linkage
  misc_feature 1..32: note = RM115467

SEQ ID NO: 823 - DNA, 32 bp, synthetic construct; identical to SEQ ID NO: 79
  source 1..32: mol_type = other DNA
  misc_feature 10..11: note = DNA
  misc_feature order(1..9,12..32): note = RNA
  modified_base 9: mod_base = OTHER; note = 2-Prime-O-Methoxyethyl modified 5-methyl Uridine
  modified_base 10: mod_base = OTHER; note = DNA nucleotide carrying a 6-amino-5-nitro-3-yl-2(1H)-pyridone nucleobase
  modified_base order(4,13..14,18..19,22): mod_base = OTHER; note = 2-Prime-Fluoro modified nucleoside
  modified_base order(1..3,5..8,12,15..17,20..21,23..32): mod_base = OTHER; note = 2-Prime-O-Methyl modified nucleoside
  modified_base order(1^2,31^32): mod_base = OTHER; note = (1,3-dimethylimidazolidin-2-ylidene) Phosphoramidate linkage
  modified_base order(2..11,12..31): mod_base = OTHER; note = Phosphorothioate linkage
  modified_base 11^12: mod_base = OTHER; note = Methylphosphonate linkage
  misc_feature 1..32: note = RM115468

SEQ ID NO: 824 - DNA, 32 bp, synthetic construct; identical to SEQ ID NO: 80
  source 1..32: mol_type = other DNA
  misc_feature 7..8: note = DNA
  misc_feature order(1..6,9..32): note = RNA
  modified_base 6: mod_base = OTHER; note = 2-Prime-O-Methoxyethyl modified 5-methyl Uridine
  modified_base 7: mod_base = OTHER; note = DNA nucleotide carrying a 6-amino-5-nitro-3-yl-2(1H)-pyridone nucleobase
  modified_base order(1,10..11,15..16,19): mod_base = OTHER; note = 2-Prime-Fluoro modified nucleoside
  modified_base order(2..5,9,12..14,17..18,20..32): mod_base = OTHER; note = 2-Prime-O-Methyl modified nucleoside
  modified_base order(1^2,31^32): mod_base = OTHER; note = (1,3-dimethylimidazolidin-2-ylidene) Phosphoramidate linkage
  modified_base order(2..8,9..31): mod_base = OTHER; note = Phosphorothioate linkage
  modified_base 8^9: mod_base = OTHER; note = Methylphosphonate linkage
  misc_feature 1..32: note = RM115469

SEQ ID NO: 825 - DNA, 32 bp, synthetic construct; identical to SEQ ID NO: 73
  source 1..32: mol_type = other DNA
  misc_feature 28..29: note = DNA
  misc_feature order(1..27,30..32): note = RNA
  modified_base 27: mod_base = OTHER; note = 2-Prime-O-Methoxyethyl modified 5-methyl Uridine
  modified_base 28: mod_base = OTHER; note = DNA nucleotide carrying a 6-amino-5-nitro-3-yl-2(1H)-pyridone nucleobase
  modified_base order(22,26,31): mod_base = OTHER; note = 2-Prime-Fluoro modified nucleoside
  modified_base order(1..21,23..25,30,32): mod_base = OTHER; note = 2-Prime-O-Methyl modified nucleoside
  modified_base order(1^2,31^32): mod_base = OTHER; note = (1,3-dimethylimidazolidin-2-ylidene) Phosphoramidate linkage
  modified_base order(2..29,30^31): mod_base = OTHER; note = Phosphorothioate linkage
  modified_base 29^30: mod_base = OTHER; note = Methylphosphonate linkage
  misc_feature 1..32: note = RM115470

SEQ ID NO: 826 - DNA, 32 bp, synthetic construct; identical to SEQ ID NO: 74
  source 1..32: mol_type = other DNA
  misc_feature 25..26: note = DNA
  misc_feature order(1..24,27..32): note = RNA
  modified_base 24: mod_base = OTHER; note = 2-Prime-O-Methoxyethyl modified 5-methyl Uridine
  modified_base 25: mod_base = OTHER; note = DNA nucleotide carrying a 6-amino-5-nitro-3-yl-2(1H)-pyridone nucleobase
  modified_base order(19,23,28): mod_base = OTHER; note = 2-Prime-Fluoro modified nucleoside
  modified_base order(1..18,20..22,27,29..32): mod_base = OTHER; note = 2-Prime-O-Methyl modified nucleoside
  modified_base order(1^2,31^32): mod_base = OTHER; note = (1,3-dimethylimidazolidin-2-ylidene) Phosphoramidate linkage
  modified_base order(2..26,27..31): mod_base = OTHER; note = Phosphorothioate linkage
  modified_base 26^27: mod_base = OTHER; note = Methylphosphonate linkage
  misc_feature 1..32: note = RM115471

SEQ ID NO: 827 - DNA, 32 bp, synthetic construct; identical to SEQ ID NO: 75
  source 1..32: mol_type = other DNA
  misc_feature 22..23: note = DNA
  misc_feature order(1..21,24..32): note = RNA
  modified_base 21: mod_base = OTHER; note = 2-Prime-O-Methoxyethyl modified 5-methyl Uridine
  modified_base 22: mod_base = OTHER; note = DNA nucleotide carrying a 6-amino-5-nitro-3-yl-2(1H)-pyridone nucleobase
  modified_base order(16,20,25): mod_base = OTHER; note = 2-Prime-Fluoro modified nucleoside
  modified_base order(1..15,17..19,24,26..32): mod_base = OTHER; note = 2-Prime-O-Methyl modified nucleoside
  modified_base order(1^2,31^32): mod_base = OTHER; note = (1,3-dimethylimidazolidin-2-ylidene) Phosphoramidate linkage
  modified_base order(2..23,24..31): mod_base = OTHER; note = Phosphorothioate linkage
  modified_base 23^24: mod_base = OTHER; note = Methylphosphonate linkage
  misc_feature 1..32: note = RM115472

SEQ ID NO: 828 - DNA, 32 bp, synthetic construct; identical to SEQ ID NO: 76
  source 1..32: mol_type = other DNA
  misc_feature 19..20: note = DNA
  misc_feature order(1..18,21..32): note = RNA
  modified_base 18: mod_base = OTHER; note = 2-Prime-O-Methoxyethyl modified 5-methyl Uridine
  modified_base 19: mod_base = OTHER; note = DNA nucleotide carrying a 6-amino-5-nitro-3-yl-2(1H)-pyridone nucleobase
  modified_base order(13,17,22): mod_base = OTHER; note = 2-Prime-Fluoro modified nucleoside
  modified_base order(1..12,14..16,21,23..32): mod_base = OTHER; note = 2-Prime-O-Methyl modified nucleoside
  modified_base order(1^2,31^32): mod_base = OTHER; note = (1,3-dimethylimidazolidin-2-ylidene) Phosphoramidate linkage
  modified_base order(2..20,21..31): mod_base = OTHER; note = Phosphorothioate linkage
  modified_base 20^21: mod_base = OTHER; note = Methylphosphonate linkage
  misc_feature 1..32: note = RM115473

SEQ ID NO: 829 - DNA, 32 bp, synthetic construct; identical to SEQ ID NO: 77
  source 1..32: mol_type = other DNA
  misc_feature 16..17: note = DNA
  misc_feature order(1..15,18..32): note = RNA
  modified_base 15: mod_base = OTHER; note = 2-Prime-O-Methoxyethyl modified 5-methyl Uridine
  modified_base 16: mod_base = OTHER; note = DNA nucleotide carrying a 6-amino-5-nitro-3-yl-2(1H)-pyridone nucleobase
  modified_base order(10,14,19): mod_base = OTHER; note = 2-Prime-Fluoro modified nucleoside
  modified_base order(1..9,11..13,18,20..32): mod_base = OTHER; note = 2-Prime-O-Methyl modified nucleoside
  modified_base order(1^2,31^32): mod_base = OTHER; note = (1,3-dimethylimidazolidin-2-ylidene) Phosphoramidate linkage
  modified_base order(2..17,18..31): mod_base = OTHER; note = Phosphorothioate linkage
  modified_base 17^18: mod_base = OTHER; note = Methylphosphonate linkage
  misc_feature 1..32: note = RM115474

SEQ ID NO: 830 - DNA, 32 bp, synthetic construct; identical to SEQ ID NO: 78
  source 1..32: mol_type = other DNA
  misc_feature 13..14: note = DNA
  misc_feature order(1..12,15..32): note = RNA
  modified_base 12: mod_base = OTHER; note = 2-Prime-O-Methoxyethyl modified 5-methyl Uridine
  modified_base 13: mod_base = OTHER; note = DNA nucleotide carrying a 6-amino-5-nitro-3-yl-2(1H)-pyridone nucleobase
  modified_base order(7,11,16): mod_base = OTHER; note = 2-Prime-Fluoro modified nucleoside
  modified_base order(1..6,8..10,15,17..32): mod_base = OTHER; note = 2-Prime-O-Methyl modified nucleoside
  modified_base order(1^2,31^32): mod_base = OTHER; note = (1,3-dimethylimidazolidin-2-ylidene) Phosphoramidate linkage
  modified_base order(2..14,15..31): mod_base = OTHER; note = Phosphorothioate linkage
  modified_base 14^15: mod_base = OTHER; note = Methylphosphonate linkage
  misc_feature 1..32: note = RM115475

SEQ ID NO: 831 - DNA, 32 bp, synthetic construct; identical to SEQ ID NO: 79
  source 1..32: mol_type = other DNA
  misc_feature 10..11: note = DNA
  misc_feature order(1..9,12..32): note = RNA
  modified_base 9: mod_base = OTHER; note = 2-Prime-O-Methoxyethyl modified 5-methyl Uridine
  modified_base 10: mod_base = OTHER; note = DNA nucleotide carrying a 6-amino-5-nitro-3-yl-2(1H)-pyridone nucleobase
  modified_base order(4,8,13): mod_base = OTHER; note = 2-Prime-Fluoro modified nucleoside
  modified_base order(1..3,5..7,12,14..32): mod_base = OTHER; note = 2-Prime-O-Methyl modified nucleoside
  modified_base order(1^2,31^32): mod_base = OTHER; note = (1,3-dimethylimidazolidin-2-ylidene) Phosphoramidate linkage
  modified_base order(2..11,12..31): mod_base = OTHER; note = Phosphorothioate linkage
  modified_base 11^12: mod_base = OTHER; note = Methylphosphonate linkage
  misc_feature 1..32: note = RM115476

SEQ ID NO: 832 - DNA, 32 bp, synthetic construct; identical to SEQ ID NO: 80
  source 1..32: mol_type = other DNA
  misc_feature 7..8: note = DNA
  misc_feature order(1..6,9..32): note = RNA
  modified_base 6: mod_base = OTHER; note = 2-Prime-O-Methoxyethyl modified 5-methyl Uridine
  modified_base 7: mod_base = OTHER; note = DNA nucleotide carrying a 6-amino-5-nitro-3-yl-2(1H)-pyridone nucleobase
  modified_base order(1,5,10): mod_base = OTHER; note = 2-Prime-Fluoro modified nucleoside
  modified_base order(2..4,9,11..32): mod_base = OTHER; note = 2-Prime-O-Methyl modified nucleoside
  modified_base order(1^2,31^32): mod_base = OTHER; note = (1,3-dimethylimidazolidin-2-ylidene) Phosphoramidate linkage
  modified_base order(2..8,9..31): mod_base = OTHER; note = Phosphorothioate linkage
  modified_base 8^9: mod_base = OTHER; note = Methylphosphonate linkage
  misc_feature 1..32: note = RM115477

SEQ ID NO: 833 - DNA, 26 bp, synthetic construct
  source 1..26: mol_type = other DNA
  misc_feature 22..23: note = DNA
  misc_feature order(1..21,24..26): note = RNA
  modified_base 21: mod_base = OTHER; note = 2-Prime-O-Methoxyethyl modified 5-methyl Uridine
  modified_base 22: mod_base = OTHER; note = DNA nucleotide carrying a 6-amino-5-nitro-3-yl-2(1H)-pyridone nucleobase
  modified_base order(5,7..9,11,25..26): mod_base = OTHER; note = 2-Prime-Fluoro modified nucleoside
  modified_base order(1..4,6,10,12..20,24): mod_base = OTHER; note = 2-Prime-O-Methyl modified nucleoside
  modified_base order(1^2,25^26): mod_base = OTHER; note = (1,3-dimethylimidazolidin-2-ylidene) Phosphoramidate linkage
  modified_base order(2..23,24^25): mod_base = OTHER; note = Phosphorothioate linkage
  modified_base 23^24: mod_base = OTHER; note = Methylphosphonate linkage
  misc_feature 1..26: note = RM115478
cattaatttggcccttcgtctnatgg

SEQ ID NO: 834 - DNA, 26 bp, synthetic construct
  source 1..26: mol_type = other DNA
  misc_feature 19..20: note = DNA
  misc_feature order(1..18,21..26): note = RNA
  modified_base 18: mod_base = OTHER; note = 2-Prime-O-Methoxyethyl modified 5-methyl Uridine
  modified_base 19: mod_base = OTHER; note = DNA nucleotide carrying a 6-amino-5-nitro-3-yl-2(1H)-pyridone nucleobase
  modified_base order(2,4..6,8,22..23): mod_base = OTHER; note = 2-Prime-Fluoro modified nucleoside
  modified_base order(1,3,7,9..17,21,24..26): mod_base = OTHER; note = 2-Prime-O-Methyl modified nucleoside
  modified_base order(1^2,25^26): mod_base = OTHER; note = (1,3-dimethylimidazolidin-2-ylidene) Phosphoramidate linkage
  modified_base order(2..20,21..25): mod_base = OTHER; note = Phosphorothioate linkage
  modified_base 20^21: mod_base = OTHER; note = Methylphosphonate linkage
  misc_feature 1..26: note = RM115479
taatttggcccttcgtctnatggaca

SEQ ID NO: 835 - DNA, 26 bp, synthetic construct
  source 1..26: mol_type = other DNA
  misc_feature 7..8: note = DNA
  misc_feature order(1..6,9..26): note = RNA
  modified_base 6: mod_base = OTHER; note = 2-Prime-O-Methoxyethyl modified 5-methyl Uridine
  modified_base 7: mod_base = OTHER; note = DNA nucleotide carrying a 6-amino-5-nitro-3-yl-2(1H)-pyridone nucleobase
  modified_base order(5,10,20,22..24,26): mod_base = OTHER; note = 2-Prime-Fluoro modified nucleoside
  modified_base order(1..4,9,11..19,21,25): mod_base = OTHER; note = 2-Prime-O-Methyl modified nucleoside
  modified_base order(1^2,25^26): mod_base = OTHER; note = (1,3-dimethylimidazolidin-2-ylidene) Phosphoramidate linkage
  modified_base order(2..8,9..25): mod_base = OTHER; note = Phosphorothioate linkage
  modified_base 8^9: mod_base = OTHER; note = Methylphosphonate linkage
  misc_feature 1..26: note = RM115480
tcgtctnatggacaaagtctttaaga

SEQ ID NO: 836 - DNA, 26 bp, synthetic construct
  source 1..26: mol_type = other DNA
  misc_feature 22..23: note = DNA
  misc_feature order(1..21,24..26): note = RNA
  modified_base 21: mod_base = OTHER; note = 2-Prime-O-Methoxyethyl modified 5-methyl Uridine
  modified_base 22: mod_base = OTHER; note = DNA nucleotide carrying a 6-amino-5-nitro-3-yl-2(1H)-pyridone nucleobase
  modified_base order(7..9,11,25): mod_base = OTHER; note = 2-Prime-Fluoro modified nucleoside
  modified_base order(1..6,10,12..20,24,26): mod_base = OTHER; note = 2-Prime-O-Methyl modified nucleoside
  modified_base order(1^2,25^26): mod_base = OTHER; note = (1,3-dimethylimidazolidin-2-ylidene) Phosphoramidate linkage
  modified_base order(2..23,24^25): mod_base = OTHER; note = Phosphorothioate linkage
  modified_base 23^24: mod_base = OTHER; note = Methylphosphonate linkage
  misc_feature 1..26: note = RM115481
cattaatttggcccttcgtctnatgg

SEQ ID NO: 837 - DNA, 26 bp, synthetic construct
  source 1..26: mol_type = other DNA
  misc_feature 19..20: note = DNA
  misc_feature order(1..18,21..26): note = RNA
  modified_base 18: mod_base = OTHER; note = 2-Prime-O-Methoxyethyl modified 5-methyl Uridine
  modified_base 19: mod_base = OTHER; note = DNA nucleotide carrying a 6-amino-5-nitro-3-yl-2(1H)-pyridone nucleobase
  modified_base order(4..6,8,22): mod_base = OTHER; note = 2-Prime-Fluoro modified nucleoside
  modified_base order(1..3,7,9..17,21,23..26): mod_base = OTHER; note = 2-Prime-O-Methyl modified nucleoside
  modified_base order(1^2,25^26): mod_base = OTHER; note = (1,3-dimethylimidazolidin-2-ylidene) Phosphoramidate linkage
  modified_base order(2..20,21..25): mod_base = OTHER; note = Phosphorothioate linkage
  modified_base 20^21: mod_base = OTHER; note = Methylphosphonate linkage
  misc_feature 1..26: note = RM115482
taatttggcccttcgtctnatggaca

SEQ ID NO: 838 - DNA, 26 bp, synthetic construct
  source 1..26: mol_type = other DNA
  misc_feature 16..17: note = DNA
  misc_feature order(1..15,18..26): note = RNA
  modified_base 15: mod_base = OTHER; note = 2-Prime-O-Methoxyethyl modified 5-methyl Uridine
  modified_base 16: mod_base = OTHER; note = DNA nucleotide carrying a 6-amino-5-nitro-3-yl-2(1H)-pyridone nucleobase
  modified_base order(1..3,5,19): mod_base = OTHER; note = 2-Prime-Fluoro modified nucleoside
  modified_base order(4,6..14,18,20..26): mod_base = OTHER; note = 2-Prime-O-Methyl modified nucleoside
  modified_base order(1^2,25^26): mod_base = OTHER; note = (1,3-dimethylimidazolidin-2-ylidene) Phosphoramidate linkage
  modified_base order(2..17,18..25): mod_base = OTHER; note = Phosphorothioate linkage
  modified_base 17^18: mod_base = OTHER; note = Methylphosphonate linkage
  misc_feature 1..26: note = RM115483
tttggcccttcgtctnatggacaaag

SEQ ID NO: 839 - DNA, 29 bp, synthetic construct
  source 1..29: mol_type = other DNA
  misc_feature 24..25: note = DNA
  misc_feature order(1..23,26..29): note = RNA
  modified_base 23: mod_base = OTHER; note = 2-Prime-O-Methoxyethyl modified 5-methyl Uridine
  modified_base 24: mod_base = OTHER; note = DNA nucleotide carrying a 6-amino-5-nitro-3-yl-2(1H)-pyridone nucleobase
  modified_base order(9..11,13,27): mod_base = OTHER; note = 2-Prime-Fluoro modified nucleoside
  modified_base order(1..8,12,14..22,26,28..29): mod_base = OTHER; note = 2-Prime-O-Methyl modified nucleoside
  modified_base order(1^2,28^29): mod_base = OTHER; note = (1,3-dimethylimidazolidin-2-ylidene) Phosphoramidate linkage
  modified_base order(2..25,26..28): mod_base = OTHER; note = Phosphorothioate linkage
  modified_base 25^26: mod_base = OTHER; note = Methylphosphonate linkage
  misc_feature 1..29: note = RM115484
gtcattaatttggcccttcgtctnatgga

SEQ ID NO: 840 - DNA, 29 bp, synthetic construct
  source 1..29: mol_type = other DNA
  misc_feature 21..22: note = DNA
  misc_feature order(1..20,23..29): note = RNA
  modified_base 20: mod_base = OTHER; note = 2-Prime-O-Methoxyethyl modified 5-methyl Uridine
  modified_base 21: mod_base = OTHER; note = DNA nucleotide carrying a 6-amino-5-nitro-3-yl-2(1H)-pyridone nucleobase
  modified_base order(6..8,10,24): mod_base = OTHER; note = 2-Prime-Fluoro modified nucleoside
  modified_base order(1..5,9,11..19,23,25..29): mod_base = OTHER; note = 2-Prime-O-Methyl modified nucleoside
  modified_base order(1^2,28^29): mod_base = OTHER; note = (1,3-dimethylimidazolidin-2-ylidene) Phosphoramidate linkage
  modified_base order(2..22,23..28): mod_base = OTHER; note = Phosphorothioate linkage
  modified_base 22^23: mod_base = OTHER; note = Methylphosphonate linkage
  misc_feature 1..29: note = RM115485
attaatttggcccttcgtctnatggacaa

SEQ ID NO: 841 - DNA, 29 bp, synthetic construct
  source 1..29: mol_type = other DNA
  misc_feature 18..19: note = DNA
  misc_feature order(1..17,20..29): note = RNA
  modified_base 17: mod_base = OTHER; note = 2-Prime-O-Methoxyethyl modified 5-methyl Uridine
  modified_base 18: mod_base = OTHER; note = DNA nucleotide carrying a 6-amino-5-nitro-3-yl-2(1H)-pyridone nucleobase
  modified_base order(3..5,7,21): mod_base = OTHER; note = 2-Prime-Fluoro modified nucleoside
  modified_base order(1..2,6,8..16,20,22..29): mod_base = OTHER; note = 2-Prime-O-Methyl modified nucleoside
  modified_base order(1^2,28^29): mod_base = OTHER; note = (1,3-dimethylimidazolidin-2-ylidene) Phosphoramidate linkage
  modified_base order(2..19,20..28): mod_base = OTHER; note = Phosphorothioate linkage
  modified_base 19^20: mod_base = OTHER; note = Methylphosphonate linkage
  misc_feature 1..29: note = RM115486
aatttggcccttcgtctnatggacaaagt

SEQ ID NO: 842 - DNA, 23 bp, synthetic construct
  source 1..23: mol_type = other DNA
  misc_feature 18..19: note = DNA
  misc_feature order(1..17,20..23): note = RNA
  modified_base 17: mod_base = OTHER; note = 2-Prime-O-Methoxyethyl modified 5-methyl Uridine
  modified_base 18: mod_base = OTHER; note = DNA nucleotide carrying a 6-amino-5-nitro-3-yl-2(1H)-pyridone nucleobase
  modified_base order(7,21): mod_base = OTHER; note = 2-Prime-Fluoro modified nucleoside
  modified_base order(1..6,8..16,20,22..23): mod_base = OTHER; note = 2-Prime-O-Methyl modified nucleoside
  modified_base order(1^2,22^23): mod_base = OTHER; note = (1,3-dimethylimidazolidin-2-ylidene) Phosphoramidate linkage
  modified_base order(2..19,20..22): mod_base = OTHER; note = Phosphorothioate linkage
  modified_base 19^20: mod_base = OTHER; note = Methylphosphonate linkage
  misc_feature 1..23: note = RM115487
aatttggcccttcgtctnatgga

SEQ ID NO: 843 - DNA, 23 bp, synthetic construct
  source 1..23: mol_type = other DNA
  misc_feature 15..16: note = DNA
  misc_feature order(1..14,17..23): note = RNA
  modified_base 14: mod_base = OTHER; note = 2-Prime-O-Methoxyethyl modified 5-methyl Uridine
  modified_base 15: mod_base = OTHER; note = DNA nucleotide carrying a 6-amino-5-nitro-3-yl-2(1H)-pyridone nucleobase
  modified_base order(4,18): mod_base = OTHER; note = 2-Prime-Fluoro modified nucleoside
  modified_base order(1..3,5..13,17,19..23): mod_base = OTHER; note = 2-Prime-O-Methyl modified nucleoside
  modified_base order(1^2,22^23): mod_base = OTHER; note = (1,3-dimethylimidazolidin-2-ylidene) Phosphoramidate linkage
  modified_base order(2..16,17..22): mod_base = OTHER; note = Phosphorothioate linkage
  modified_base 16^17: mod_base = OTHER; note = Methylphosphonate linkage
  misc_feature 1..23: note = RM115488
ttggcccttcgtctnatggacaa

SEQ ID NO: 844 - DNA, 23 bp, synthetic construct
  source 1..23: mol_type = other DNA
  misc_feature 12..13: note = DNA
  misc_feature order(1..11,14..23): note = RNA
  modified_base 11: mod_base = OTHER; note = 2-Prime-O-Methoxyethyl modified 5-methyl Uridine
  modified_base 12: mod_base = OTHER; note = DNA nucleotide carrying a 6-amino-5-nitro-3-yl-2(1H)-pyridone nucleobase
  modified_base order(1,15): mod_base = OTHER; note = 2-Prime-Fluoro modified nucleoside
  modified_base order(2..10,14,16..23): mod_base = OTHER; note = 2-Prime-O-Methyl modified nucleoside
  modified_base order(1^2,22^23): mod_base = OTHER; note = (1,3-dimethylimidazolidin-2-ylidene) Phosphoramidate linkage
  modified_base order(2..13,14..22): mod_base = OTHER; note = Phosphorothioate linkage
  modified_base 13^14: mod_base = OTHER; note = Methylphosphonate linkage
  misc_feature 1..23: note = RM115489
gcccttcgtctnatggacaaagt

SEQ ID NO: 845 - DNA, 26 bp, synthetic construct
  source 1..26: mol_type = other DNA
  misc_feature 22..23: note = DNA
  misc_feature order(1..21,24..26): note = RNA
  modified_base 21: mod_base = OTHER; note = 2-Prime-O-Methoxyethyl modified 5-methyl Uridine
  modified_base 22: mod_base = OTHER; note = DNA nucleotide carrying a 6-amino-5-nitro-3-yl-2(1H)-pyridone nucleobase
  modified_base order(11,25): mod_base = OTHER; note = 2-Prime-Fluoro modified nucleoside
  modified_base order(1..10,12..20,24,26): mod_base = OTHER; note = 2-Prime-O-Methyl modified nucleoside
  modified_base order(1^2,25^26): mod_base = OTHER; note = (1,3-dimethylimidazolidin-2-ylidene) Phosphoramidate linkage
  modified_base order(2..23,24^25): mod_base = OTHER; note = Phosphorothioate linkage
  modified_base 23^24: mod_base = OTHER; note = Methylphosphonate linkage
  misc_feature 1..26: note = RM115490
cattaatttggcccttcgtctnatgg

SEQ ID NO: 846 - DNA, 26 bp, synthetic construct
  source 1..26: mol_type = other DNA
  misc_feature 19..20: note = DNA
  misc_feature order(1..18,21..26): note = RNA
  modified_base 18: mod_base = OTHER; note = 2-Prime-O-Methoxyethyl modified 5-methyl Uridine
  modified_base 19: mod_base = OTHER; note = DNA nucleotide carrying a 6-amino-5-nitro-3-yl-2(1H)-pyridone nucleobase
  modified_base order(8,22): mod_base = OTHER; note = 2-Prime-Fluoro modified nucleoside
  modified_base order(1..7,9..17,21,23..26): mod_base = OTHER; note = 2-Prime-O-Methyl modified nucleoside
  modified_base order(1^2,25^26): mod_base = OTHER; note = (1,3-dimethylimidazolidin-2-ylidene) Phosphoramidate linkage
  modified_base order(2..20,21..25): mod_base = OTHER; note = Phosphorothioate linkage
  modified_base 20^21: mod_base = OTHER; note = Methylphosphonate linkage
  misc_feature 1..26: note = RM115491
taatttggcccttcgtctnatggaca

SEQ ID NO: 847 - DNA, 26 bp, synthetic construct
  source 1..26: mol_type = other DNA
  misc_feature 16..17: note = DNA
  misc_feature order(1..15,18..26): note = RNA
  modified_base 15: mod_base = OTHER; note = 2-Prime-O-Methoxyethyl modified 5-methyl Uridine
  modified_base 16: mod_base = OTHER; note = DNA nucleotide carrying a 6-amino-5-nitro-3-yl-2(1H)-pyridone nucleobase
  modified_base order(5,19): mod_base = OTHER; note = 2-Prime-Fluoro modified nucleoside
  modified_base order(1..4,6..14,18,20..26): mod_base = OTHER; note = 2-Prime-O-Methyl modified nucleoside
  modified_base order(1^2,25^26): mod_base = OTHER; note = (1,3-dimethylimidazolidin-2-ylidene) Phosphoramidate linkage
  modified_base order(2..17,18..25): mod_base = OTHER; note = Phosphorothioate linkage
  modified_base 17^18: mod_base = OTHER; note = Methylphosphonate linkage
  misc_feature 1..26: note = RM115492
tttggcccttcgtctnatggacaaag

SEQ ID NO: 848 - DNA, 26 bp, synthetic construct
  source 1..26: mol_type = other DNA
  misc_feature 13..14: note = DNA
  misc_feature order(1..12,15..26): note = RNA
  modified_base 12: mod_base = OTHER; note = 2-Prime-O-Methoxyethyl modified 5-methyl Uridine
  modified_base 13: mod_base = OTHER; note = DNA nucleotide carrying a 6-amino-5-nitro-3-yl-2(1H)-pyridone nucleobase
  modified_base order(2,16): mod_base = OTHER; note = 2-Prime-Fluoro modified nucleoside
  modified_base order(1,3..11,15,17..26): mod_base = OTHER; note = 2-Prime-O-Methyl modified nucleoside
  modified_base order(1^2,25^26): mod_base = OTHER; note = (1,3-dimethylimidazolidin-2-ylidene) Phosphoramidate linkage
  modified_base order(2..14,15..25): mod_base = OTHER; note = Phosphorothioate linkage
  modified_base 14^15: mod_base = OTHER; note = Methylphosphonate linkage
  misc_feature 1..26: note = RM115493
ggcccttcgtctnatggacaaagtct

SEQ ID NO: 849 - DNA, 29 bp, synthetic construct
  source 1..29: mol_type = other DNA
  misc_feature 24..25: note = DNA
  misc_feature order(1..23,26..29): note = RNA
  modified_base 23: mod_base = OTHER; note = 2-Prime-O-Methoxyethyl modified 5-methyl Uridine
  modified_base 24: mod_base = OTHER; note = DNA nucleotide carrying a 6-amino-5-nitro-3-yl-2(1H)-pyridone nucleobase
  modified_base order(13,27): mod_base = OTHER; note = 2-Prime-Fluoro modified nucleoside
  modified_base order(1..12,14..22,26,28..29): mod_base = OTHER; note = 2-Prime-O-Methyl modified nucleoside
  modified_base order(1^2,28^29): mod_base = OTHER; note = (1,3-dimethylimidazolidin-2-ylidene) Phosphoramidate linkage
  modified_base order(2..25,26..28): mod_base = OTHER; note = Phosphorothioate linkage
  modified_base 25^26: mod_base = OTHER; note = Methylphosphonate linkage
  misc_feature 1..29: note = RM115494
gtcattaatttggcccttcgtctnatgga

SEQ ID NO: 850 - DNA, 29 bp, synthetic construct
  source 1..29: mol_type = other DNA
  misc_feature 21..22: note = DNA
  misc_feature order(1..20,23..29): note = RNA
  modified_base 20: mod_base = OTHER; note = 2-Prime-O-Methoxyethyl modified 5-methyl Uridine
  modified_base 21: mod_base = OTHER; note = DNA nucleotide carrying a 6-amino-5-nitro-3-yl-2(1H)-pyridone nucleobase
  modified_base order(10,24): mod_base = OTHER; note = 2-Prime-Fluoro modified nucleoside
  modified_base order(1..9,11..19,23,25..29): mod_base = OTHER; note = 2-Prime-O-Methyl modified nucleoside
  modified_base order(1^2,28^29): mod_base = OTHER; note = (1,3-dimethylimidazolidin-2-ylidene) Phosphoramidate linkage
  modified_base order(2..22,23..28): mod_base = OTHER; note = Phosphorothioate linkage
  modified_base 22^23: mod_base = OTHER; note = Methylphosphonate linkage
  misc_feature 1..29: note = RM115495
attaatttggcccttcgtctnatggacaa

SEQ ID NO: 851 - DNA, 29 bp, synthetic construct
  source 1..29: mol_type = other DNA
  misc_feature 18..19: note = DNA
  misc_feature order(1..17,20..29): note = RNA
  modified_base 17: mod_base = OTHER; note = 2-Prime-O-Methoxyethyl modified 5-methyl Uridine
  modified_base 18: mod_base = OTHER; note = DNA nucleotide carrying a 6-amino-5-nitro-3-yl-2(1H)-pyridone nucleobase
  modified_base order(7,21): mod_base = OTHER; note = 2-Prime-Fluoro modified nucleoside
  modified_base order(1..6,8..16,20,22..29): mod_base = OTHER; note = 2-Prime-O-Methyl modified nucleoside
  modified_base order(1^2,28^29): mod_base = OTHER; note = (1,3-dimethylimidazolidin-2-ylidene) Phosphoramidate linkage
  modified_base order(2..19,20..28): mod_base = OTHER; note = Phosphorothioate linkage
  modified_base 19^20: mod_base = OTHER; note = Methylphosphonate linkage
  misc_feature 1..29: note = RM115496
aatttggcccttcgtctnatggacaaagt

SEQ ID NO: 852 - DNA, 29 bp, synthetic construct
  source 1..29: mol_type = other DNA
  misc_feature 15..16: note = DNA
  misc_feature order(1..14,17..29): note = RNA
  modified_base 14: mod_base = OTHER; note = 2-Prime-O-Methoxyethyl modified 5-methyl Uridine
  modified_base 15: mod_base = OTHER; note = DNA nucleotide carrying a 6-amino-5-nitro-3-yl-2(1H)-pyridone nucleobase
  modified_base order(4,18): mod_base = OTHER; note = 2-Prime-Fluoro modified nucleoside
  modified_base order(1..3,5..13,17,19..29): mod_base = OTHER; note = 2-Prime-O-Methyl modified nucleoside
  modified_base order(1^2,28^29): mod_base = OTHER; note = (1,3-dimethylimidazolidin-2-ylidene) Phosphoramidate linkage
  modified_base order(2..16,17..28): mod_base = OTHER; note = Phosphorothioate linkage
  modified_base 16^17: mod_base = OTHER; note = Methylphosphonate linkage
  misc_feature 1..29: note = RM115497
ttggcccttcgtctnatggacaaagtctt

SEQ ID NO: 853 - DNA, 29 bp, synthetic construct
  source 1..29: mol_type = other DNA
  misc_feature 12..13: note = DNA
  misc_feature order(1..11,14..29): note = RNA
  modified_base 11: mod_base = OTHER; note = 2-Prime-O-Methoxyethyl modified 5-methyl Uridine
  modified_base 12: mod_base = OTHER; note = DNA nucleotide carrying a 6-amino-5-nitro-3-yl-2(1H)-pyridone nucleobase
  modified_base order(1,15): mod_base = OTHER; note = 2-Prime-Fluoro modified nucleoside
  modified_base order(2..10,14,16..29): mod_base = OTHER; note = 2-Prime-O-Methyl modified nucleoside
  modified_base order(1^2,28^29): mod_base = OTHER; note = (1,3-dimethylimidazolidin-2-ylidene) Phosphoramidate linkage
  modified_base order(2..13,14..28): mod_base = OTHER; note = Phosphorothioate linkage
  modified_base 13^14: mod_base = OTHER; note = Methylphosphonate linkage
  misc_feature 1..29: note = RM115498
gcccttcgtctnatggacaaagtctttaa

SEQ ID NO: 854 - DNA, 32 bp, synthetic construct; identical to SEQ ID NO: 77
  source 1..32: mol_type = other DNA
  misc_feature 15..17: note = DNA
  misc_feature order(1..14,18..32): note = RNA
  modified_base 16: mod_base = OTHER; note = DNA nucleotide carrying a 6-amino-5-nitro-3-yl-2(1H)-pyridone nucleobase
  modified_base order(2,5..6,13,19..22,31): mod_base = OTHER; note = 2-Prime-Fluoro modified nucleoside
  modified_base order(1,3..4,7..12,14,18,23..30,32): mod_base = OTHER; note = 2-Prime-O-Methyl modified nucleoside
  modified_base order(1^2,17^18,31^32): mod_base = OTHER; note = (1,3-dimethylimidazolidin-2-ylidene) Phosphoramidate linkage
  modified_base order(2..17,18..31): mod_base = OTHER; note = Phosphorothioate linkage
  misc_feature 1..32: note = RM115499

SEQ ID NO: 855 - DNA, 32 bp, synthetic construct; identical to SEQ ID NO: 77
  source 1..32: mol_type = other DNA
  misc_feature 15..17: note = DNA
  misc_feature order(1..14,18..32): note = RNA
  modified_base 16: mod_base = OTHER; note = DNA nucleotide carrying a 6-amino-5-nitro-3-yl-2(1H)-pyridone nucleobase
  modified_base order(3,12..14,19,21,28..29,32): mod_base = OTHER; note = 2-Prime-Fluoro modified nucleoside
  modified_base order(1..2,4..11,18,20,22..27,30..31): mod_base = OTHER; note = 2-Prime-O-Methyl modified nucleoside
  modified_base order(1^2,17^18,31^32): mod_base = OTHER; note = (1,3-dimethylimidazolidin-2-ylidene) Phosphoramidate linkage
  modified_base order(2..17,18..31): mod_base = OTHER; note = Phosphorothioate linkage
  misc_feature 1..32: note = RM115500

SEQ ID NO: 856 - DNA, 23 bp, synthetic construct
  source 1..23: mol_type = other DNA
  misc_feature 17..19: note = DNA
  misc_feature order(1..16,20..23): note = RNA
  modified_base 18: mod_base = OTHER; note = DNA nucleotide carrying a 6-amino-5-nitro-3-yl-2(1H)-pyridone nucleobase
  modified_base order(7..8,15,21..23): mod_base = OTHER; note = 2-Prime-Fluoro modified nucleoside
  modified_base order(1..6,9..14,16,20): mod_base = OTHER; note = 2-Prime-O-Methyl modified nucleoside
  modified_base order(1^2,19^20,22^23): mod_base = OTHER; note = (1,3-dimethylimidazolidin-2-ylidene) Phosphoramidate linkage
  modified_base order(2..19,20..22): mod_base = OTHER; note = Phosphorothioate linkage
  misc_feature 1..23: note = RM115501
aatttggcccttcgtctnatgga

SEQ ID NO: 857 - DNA, 23 bp, synthetic construct
  source 1..23: mol_type = other DNA
  misc_feature 14..16: note = DNA
  misc_feature order(1..13,17..23): note = RNA
  modified_base 15: mod_base = OTHER; note = DNA nucleotide carrying a 6-amino-5-nitro-3-yl-2(1H)-pyridone nucleobase
  modified_base order(4..5,12,18..20): mod_base = OTHER; note = 2-Prime-Fluoro modified nucleoside
  modified_base order(1..3,6..11,13,17,21..23): mod_base = OTHER; note = 2-Prime-O-Methyl modified nucleoside
  modified_base order(1^2,16^17,22^23): mod_base = OTHER; note = (1,3-dimethylimidazolidin-2-ylidene) Phosphoramidate linkage
  modified_base order(2..16,17..22): mod_base = OTHER; note = Phosphorothioate linkage
  misc_feature 1..23: note = RM115502
ttggcccttcgtctnatggacaa

SEQ ID NO: 858 - DNA, 23 bp, synthetic construct
  source 1..23: mol_type = other DNA
  misc_feature 11..13: note = DNA
  misc_feature order(1..10,14..23): note = RNA
  modified_base 12: mod_base = OTHER; note = DNA nucleotide carrying a 6-amino-5-nitro-3-yl-2(1H)-pyridone nucleobase
  modified_base order(1..2,9,15..17): mod_base = OTHER; note = 2-Prime-Fluoro modified nucleoside
  modified_base order(3..8,10,14,18..23): mod_base = OTHER; note = 2-Prime-O-Methyl modified nucleoside
  modified_base order(1^2,13^14,22^23): mod_base = OTHER; note = (1,3-dimethylimidazolidin-2-ylidene) Phosphoramidate linkage
  modified_base order(2..13,14..22): mod_base = OTHER; note = Phosphorothioate linkage
  misc_feature 1..23: note = RM115503
gcccttcgtctnatggacaaagt

SEQ ID NO: 859 - DNA, 32 bp, synthetic construct; identical to SEQ ID NO: 74
  source 1..32: mol_type = other DNA
  misc_feature 24..26: note = DNA
  misc_feature order(1..23,27..32): note = RNA
  modified_base 25: mod_base = OTHER; note = DNA nucleotide carrying a 6-amino-5-nitro-3-yl-2(1H)-pyridone nucleobase
  modified_base order(14..15,22,28..30): mod_base = OTHER; note = 2-Prime-Fluoro modified nucleoside
  modified_base order(1..13,16..21,23,27,31..32): mod_base = OTHER; note = 2-Prime-O-Methyl modified nucleoside
  modified_base order(1^2,26^27,31^32): mod_base = OTHER; note = (1,3-dimethylimidazolidin-2-ylidene) Phosphoramidate linkage
  modified_base order(2..26,27..31): mod_base = OTHER; note = Phosphorothioate linkage
  misc_feature 1..32: note = RM115504

SEQ ID NO: 860 - DNA, 32 bp, synthetic construct; identical to SEQ ID NO: 75
  source 1..32: mol_type = other DNA
  misc_feature 21..23: note = DNA
  misc_feature order(1..20,24..32): note = RNA
  modified_base 22: mod_base = OTHER; note = DNA nucleotide carrying a 6-amino-5-nitro-3-yl-2(1H)-pyridone nucleobase
  modified_base order(11..12,19,25..27): mod_base = OTHER; note = 2-Prime-Fluoro modified nucleoside
  modified_base order(1..10,13..18,20,24,28..32): mod_base = OTHER; note = 2-Prime-O-Methyl modified nucleoside
  modified_base order(1^2,23^24,31^32): mod_base = OTHER; note = (1,3-dimethylimidazolidin-2-ylidene) Phosphoramidate linkage
  modified_base order(2..23,24..31): mod_base = OTHER; note = Phosphorothioate linkage
  misc_feature 1..32: note = RM115505

SEQ ID NO: 861 - DNA, 32 bp, synthetic construct; identical to SEQ ID NO: 76
  source 1..32: mol_type = other DNA
  misc_feature 18..20: note = DNA
  misc_feature order(1..17,21..32): note = RNA
  modified_base 19: mod_base = OTHER; note = DNA nucleotide carrying a 6-amino-5-nitro-3-yl-2(1H)-pyridone nucleobase
  modified_base order(8..9,16,22..24): mod_base = OTHER; note = 2-Prime-Fluoro modified nucleoside
  modified_base order(1..7,10..15,17,21,25..32): mod_base = OTHER; note = 2-Prime-O-Methyl modified nucleoside
  modified_base order(1^2,20^21,31^32): mod_base = OTHER; note = (1,3-dimethylimidazolidin-2-ylidene) Phosphoramidate linkage
  modified_base order(2..20,21..31): mod_base = OTHER; note = Phosphorothioate linkage
  misc_feature 1..32: note = RM115506

SEQ ID NO: 862 - DNA, 32 bp, synthetic construct; identical to SEQ ID NO: 77
  source 1..32: mol_type = other DNA
  misc_feature 15..17: note = DNA
  misc_feature order(1..14,18..32): note = RNA
  modified_base 16: mod_base = OTHER; note = DNA nucleotide carrying a 6-amino-5-nitro-3-yl-2(1H)-pyridone nucleobase
  modified_base order(5..6,13,19..21): mod_base = OTHER; note = 2-Prime-Fluoro modified nucleoside
  modified_base order(1..4,7..12,14,18,22..32): mod_base = OTHER; note = 2-Prime-O-Methyl modified nucleoside
  modified_base order(1^2,17^18,31^32): mod_base = OTHER; note = (1,3-dimethylimidazolidin-2-ylidene) Phosphoramidate linkage
  modified_base order(2..17,18..31): mod_base = OTHER; note = Phosphorothioate linkage
  misc_feature 1..32: note = RM115507

SEQ ID NO: 863 - DNA, 32 bp, synthetic construct; identical to SEQ ID NO: 78
  source 1..32: mol_type = other DNA
  misc_feature 12..14: note = DNA
  misc_feature order(1..11,15..32): note = RNA
  modified_base 13: mod_base = OTHER; note = DNA nucleotide carrying a 6-amino-5-nitro-3-yl-2(1H)-pyridone nucleobase
  modified_base order(2..3,10,16..18): mod_base = OTHER; note = 2-Prime-Fluoro modified nucleoside
  modified_base order(1,4..9,11,15,19..32): mod_base = OTHER; note = 2-Prime-O-Methyl modified nucleoside
  modified_base order(1^2,14^15,31^32): mod_base = OTHER; note = (1,3-dimethylimidazolidin-2-ylidene) Phosphoramidate linkage
  modified_base order(2..14,15..31): mod_base = OTHER; note = Phosphorothioate linkage
  misc_feature 1..32: note = RM115508

SEQ ID NO: 864 - DNA, 23 bp, synthetic construct
  source 1..23: mol_type = other DNA
  misc_feature 8..10: note = DNA
  misc_feature order(1..7,11..23): note = RNA
  modified_base 9: mod_base = OTHER; note = DNA nucleotide carrying a 6-amino-5-nitro-3-yl-2(1H)-pyridone nucleobase
  modified_base order(6..7,12,14,21..22): mod_base = OTHER; note = 2-Prime-Fluoro modified nucleoside
  modified_base order(1..5,11,13,15..20,23): mod_base = OTHER; note = 2-Prime-O-Methyl modified nucleoside
  modified_base order(1^2,10^11,22^23): mod_base = OTHER; note = (1,3-dimethylimidazolidin-2-ylidene) Phosphoramidate linkage
  modified_base order(2..10,11..22): mod_base = OTHER; note = Phosphorothioate linkage
  misc_feature 1..23: note = RM115509
cttcgtctnatggacaaagtctt

SEQ ID NO: 865 - DNA, 23 bp, synthetic construct
  source 1..23: mol_type = other DNA
  misc_feature 5..7: note = DNA
  misc_feature order(1..4,8..23): note = RNA
  modified_base 6: mod_base = OTHER; note = DNA nucleotide carrying a 6-amino-5-nitro-3-yl-2(1H)-pyridone nucleobase
  modified_base order(3..4,9,11,18..19): mod_base = OTHER; note = 2-Prime-Fluoro modified nucleoside
  modified_base order(1..2,8,10,12..17,20..23): mod_base = OTHER; note = 2-Prime-O-Methyl modified nucleoside
  modified_base order(1^2,7^8,22^23): mod_base = OTHER; note = (1,3-dimethylimidazolidin-2-ylidene) Phosphoramidate linkage
  modified_base order(2..7,8..22): mod_base = OTHER; note = Phosphorothioate linkage
  misc_feature 1..23: note = RM115510
cgtctnatggacaaagtctttaa

SEQ ID NO: 866 - DNA, 32 bp, synthetic construct; identical to SEQ ID NO: 76
  source 1..32: mol_type = other DNA
  misc_feature 18..20: note = DNA
  misc_feature order(1..17,21..32): note = RNA
  modified_base 19: mod_base = OTHER; note = DNA nucleotide carrying a 6-amino-5-nitro-3-yl-2(1H)-pyridone nucleobase
  modified_base order(16..17,22,24,31..32): mod_base = OTHER; note = 2-Prime-Fluoro modified nucleoside
  modified_base order(1..15,21,23,25..30): mod_base = OTHER; note = 2-Prime-O-Methyl modified nucleoside
  modified_base order(1^2,20^21,31^32): mod_base = OTHER; note = (1,3-dimethylimidazolidin-2-ylidene) Phosphoramidate linkage
  modified_base order(2..20,21..31): mod_base = OTHER; note = Phosphorothioate linkage
  misc_feature 1..32: note = RM115511

SEQ ID NO: 867 - DNA, 32 bp, synthetic construct; identical to SEQ ID NO: 77
  source 1..32: mol_type = other DNA
  misc_feature 15..17: note = DNA
  misc_feature order(1..14,18..32): note = RNA
  modified_base 16: mod_base = OTHER; note = DNA nucleotide carrying a 6-amino-5-nitro-3-yl-2(1H)-pyridone nucleobase
  modified_base order(13..14,19,21,28..29): mod_base = OTHER; note = 2-Prime-Fluoro modified nucleoside
  modified_base order(1..12,18,20,22..27,30..32): mod_base = OTHER; note = 2-Prime-O-Methyl modified nucleoside
  modified_base order(1^2,17^18,31^32): mod_base = OTHER; note = (1,3-dimethylimidazolidin-2-ylidene) Phosphoramidate linkage
  modified_base order(2..17,18..31): mod_base = OTHER; note = Phosphorothioate linkage
  misc_feature 1..32: note = RM115512

SEQ ID NO: 868 - DNA, 32 bp, synthetic construct; identical to SEQ ID NO: 78
  source 1..32: mol_type = other DNA
  misc_feature 12..14: note = DNA
  misc_feature order(1..11,15..32): note = RNA
  modified_base 13: mod_base = OTHER; note = DNA nucleotide carrying a 6-amino-5-nitro-3-yl-2(1H)-pyridone nucleobase
  modified_base order(10..11,16,18,25..26): mod_base = OTHER; note = 2-Prime-Fluoro modified nucleoside
  modified_base order(1..9,15,17,19..24,27..32): mod_base = OTHER; note = 2-Prime-O-Methyl modified nucleoside
  modified_base order(1^2,14^15,31^32): mod_base = OTHER; note = (1,3-dimethylimidazolidin-2-ylidene) Phosphoramidate linkage
  modified_base order(2..14,15..31): mod_base = OTHER; note = Phosphorothioate linkage
  misc_feature 1..32: note = RM115513

SEQ ID NO: 869 - DNA, 32 bp, synthetic construct; identical to SEQ ID NO: 79
  source 1..32: mol_type = other DNA
  misc_feature 9..11: note = DNA
  misc_feature order(1..8,12..32): note = RNA
  modified_base 10: mod_base = OTHER; note = DNA nucleotide carrying a 6-amino-5-nitro-3-yl-2(1H)-pyridone nucleobase
  modified_base order(7..8,13,15,22..23): mod_base = OTHER; note = 2-Prime-Fluoro modified nucleoside
  modified_base order(1..6,12,14,16..21,24..32): mod_base = OTHER; note = 2-Prime-O-Methyl modified nucleoside
  modified_base order(1^2,11^12,31^32): mod_base = OTHER; note = (1,3-dimethylimidazolidin-2-ylidene) Phosphoramidate linkage
  modified_base order(2..11,12..31): mod_base = OTHER; note = Phosphorothioate linkage
  misc_feature 1..32: note = RM115514

SEQ ID NO: 870 - DNA, 32 bp, synthetic construct; identical to SEQ ID NO: 80
  source 1..32: mol_type = other DNA
  misc_feature 6..8: note = DNA
  misc_feature order(1..5,9..32): note = RNA
  modified_base 7: mod_base = OTHER; note = DNA nucleotide carrying a 6-amino-5-nitro-3-yl-2(1H)-pyridone nucleobase
  modified_base order(4..5,10,12,19..20): mod_base = OTHER; note = 2-Prime-Fluoro modified nucleoside
  modified_base order(1..3,9,11,13..18,21..32): mod_base = OTHER; note = 2-Prime-O-Methyl modified nucleoside
  modified_base order(1^2,8^9,31^32): mod_base = OTHER; note = (1,3-dimethylimidazolidin-2-ylidene) Phosphoramidate linkage
  modified_base order(2..8,9..31): mod_base = OTHER; note = Phosphorothioate linkage
  misc_feature 1..32: note = RM115515

SEQ ID NO: 871 - DNA, 32 bp, synthetic construct; identical to SEQ ID NO: 73
  source 1..32: mol_type = other DNA
  misc_feature 27..29: note = DNA
  misc_feature order(1..26,30..32): note = RNA
  modified_base 28: mod_base = OTHER; note = DNA nucleotide carrying a 6-amino-5-nitro-3-yl-2(1H)-pyridone nucleobase
  modified_base order(25,31..32): mod_base = OTHER; note = 2-Prime-Fluoro modified nucleoside
  modified_base order(1..24,26,30): mod_base = OTHER; note = 2-Prime-O-Methyl modified nucleoside
  modified_base order(1^2,29^30,31^32): mod_base = OTHER; note = (1,3-dimethylimidazolidin-2-ylidene) Phosphoramidate linkage
  modified_base order(2..29,30^31): mod_base = OTHER; note = Phosphorothioate linkage
  misc_feature 1..32: note = RM115516

SEQ ID NO: 872 - DNA, 32 bp, synthetic construct; identical to SEQ ID NO: 74
  source 1..32: mol_type = other DNA
  misc_feature 24..26: note = DNA
  misc_feature order(1..23,27..32): note = RNA
  modified_base 25: mod_base = OTHER; note = DNA nucleotide carrying a 6-amino-5-nitro-3-yl-2(1H)-pyridone nucleobase
  modified_base order(22,28..29): mod_base = OTHER; note = 2-Prime-Fluoro modified nucleoside
  modified_base order(1..21,23,27,30..32): mod_base = OTHER; note = 2-Prime-O-Methyl modified nucleoside
  modified_base order(1^2,26^27,31^32): mod_base = OTHER; note = (1,3-dimethylimidazolidin-2-ylidene) Phosphoramidate linkage
  modified_base order(2..26,27..31): mod_base = OTHER; note = Phosphorothioate linkage
  misc_feature 1..32: note = RM115517

SEQ ID NO: 873 - DNA, 32 bp, synthetic construct; identical to SEQ ID NO: 75
  source 1..32: mol_type = other DNA
  misc_feature 21..23: note = DNA
  misc_feature order(1..20,24..32): note = RNA
  modified_base 22: mod_base = OTHER; note = DNA nucleotide carrying a 6-amino-5-nitro-3-yl-2(1H)-pyridone nucleobase
  modified_base order(19,25..26): mod_base = OTHER; note = 2-Prime-Fluoro modified nucleoside
  modified_base order(1..18,20,24,27..32): mod_base = OTHER; note = 2-Prime-O-Methyl modified nucleoside
  modified_base order(1^2,23^24,31^32): mod_base = OTHER; note = (1,3-dimethylimidazolidin-2-ylidene) Phosphoramidate linkage
  modified_base order(2..23,24..31): mod_base = OTHER; note = Phosphorothioate linkage
  misc_feature 1..32: note = RM115518

SEQ ID NO: 874 - DNA, 32 bp, synthetic construct; identical to SEQ ID NO: 76
  source 1..32: mol_type = other DNA
  misc_feature 18..20: note = DNA
  misc_feature order(1..17,21..32): note = RNA
  modified_base 19: mod_base = OTHER; note = DNA nucleotide carrying a 6-amino-5-nitro-3-yl-2(1H)-pyridone nucleobase
  modified_base order(16,22..23): mod_base = OTHER; note = 2-Prime-Fluoro modified nucleoside
  modified_base order(1..15,17,21,24..32): mod_base = OTHER; note = 2-Prime-O-Methyl modified nucleoside
  modified_base order(1^2,20^21,31^32): mod_base = OTHER; note = (1,3-dimethylimidazolidin-2-ylidene) Phosphoramidate linkage
  modified_base order(2..20,21..31): mod_base = OTHER; note = Phosphorothioate linkage
  misc_feature 1..32: note = RM115519

SEQ ID NO: 875 - DNA, 32 bp, synthetic construct; identical to SEQ ID NO: 77
  source 1..32: mol_type = other DNA
  misc_feature 15..17: note = DNA
  misc_feature order(1..14,18..32): note = RNA
  modified_base 16: mod_base = OTHER; note = DNA nucleotide carrying a 6-amino-5-nitro-3-yl-2(1H)-pyridone nucleobase
  modified_base order(13,19..20): mod_base = OTHER; note = 2-Prime-Fluoro modified nucleoside
  modified_base order(1..12,14,18,21..32): mod_base = OTHER; note = 2-Prime-O-Methyl modified nucleoside
  modified_base order(1^2,17^18,31^32): mod_base = OTHER; note = (1,3-dimethylimidazolidin-2-ylidene) Phosphoramidate linkage
  modified_base order(2..17,18..31): mod_base = OTHER; note = Phosphorothioate linkage
  misc_feature 1..32: note = RM115520

SEQ ID NO: 876 - DNA, 32 bp, synthetic construct; identical to SEQ ID NO: 78
  source 1..32: mol_type = other DNA
  misc_feature 12..14: note = DNA
  misc_feature order(1..11,15..32): note = RNA
  modified_base 13: mod_base = OTHER; note = DNA nucleotide carrying a 6-amino-5-nitro-3-yl-2(1H)-pyridone nucleobase
  modified_base order(10,16..17): mod_base = OTHER; note = 2-Prime-Fluoro modified nucleoside
  modified_base order(1..9,11,15,18..32): mod_base = OTHER; note = 2-Prime-O-Methyl modified nucleoside
  modified_base order(1^2,14^15,31^32): mod_base = OTHER; note = (1,3-dimethylimidazolidin-2-ylidene) Phosphoramidate linkage
  modified_base order(2..14,15..31): mod_base = OTHER; note = Phosphorothioate linkage
  misc_feature 1..32: note = RM115521

SEQ ID NO: 877 - DNA, 32 bp, synthetic construct; identical to SEQ ID NO: 79
  source 1..32: mol_type = other DNA
  misc_feature 9..11: note = DNA
  misc_feature order(1..8,12..32): note = RNA
  modified_base 10: mod_base = OTHER; note = DNA nucleotide carrying a 6-amino-5-nitro-3-yl-2(1H)-pyridone nucleobase
  modified_base order(7,13..14): mod_base = OTHER; note = 2-Prime-Fluoro modified nucleoside
  modified_base order(1..6,8,12,15..32): mod_base = OTHER; note = 2-Prime-O-Methyl modified nucleoside
  modified_base order(1^2,11^12,31^32): mod_base = OTHER; note = (1,3-dimethylimidazolidin-2-ylidene) Phosphoramidate linkage
  modified_base order(2..11,12..31): mod_base = OTHER; note = Phosphorothioate linkage
  misc_feature 1..32: note = RM115522

SEQ ID NO: 878 - DNA, 32 bp, synthetic construct; identical to SEQ ID NO: 80
  source 1..32: mol_type = other DNA
  misc_feature 6..8: note = DNA
  misc_feature order(1..5,9..32): note = RNA
  modified_base 7: mod_base = OTHER; note = DNA nucleotide carrying a 6-amino-5-nitro-3-yl-2(1H)-pyridone nucleobase
  modified_base order(4,10..11): mod_base = OTHER; note = 2-Prime-Fluoro modified nucleoside
  modified_base order(1..3,5,9,12..32): mod_base = OTHER; note = 2-Prime-O-Methyl modified nucleoside
  modified_base order(1^2,8^9,31^32): mod_base = OTHER; note = (1,3-dimethylimidazolidin-2-ylidene) Phosphoramidate linkage
  modified_base order(2..8,9..31): mod_base = OTHER; note = Phosphorothioate linkage
  misc_feature 1..32: note = RM115523

SEQ ID NO: 879 - DNA, 32 bp, synthetic construct; identical to SEQ ID NO: 74
  source 1..32: mol_type = other DNA
  misc_feature 24..26: note = DNA
  misc_feature order(1..23,27..32): note = RNA
  modified_base 25: mod_base = OTHER; note = DNA nucleotide carrying a 6-amino-5-nitro-3-yl-2(1H)-pyridone nucleobase
  modified_base order(23,28,30): mod_base = OTHER; note = 2-Prime-Fluoro modified nucleoside
  modified_base order(1..22,27,29,31..32): mod_base = OTHER; note = 2-Prime-O-Methyl modified nucleoside
  modified_base order(1^2,26^27,31^32): mod_base = OTHER; note = (1,3-dimethylimidazolidin-2-ylidene) Phosphoramidate linkage
  modified_base order(2..26,27..31): mod_base = OTHER; note = Phosphorothioate linkage
  misc_feature 1..32: note = RM115524

SEQ ID NO: 880 - DNA, 32 bp, synthetic construct; identical to SEQ ID NO: 75
  source 1..32: mol_type = other DNA
  misc_feature 21..23: note = DNA
  misc_feature order(1..20,24..32): note = RNA
  modified_base 22: mod_base = OTHER; note = DNA nucleotide carrying a 6-amino-5-nitro-3-yl-2(1H)-pyridone nucleobase
  modified_base order(20,25,27): mod_base = OTHER; note = 2-Prime-Fluoro modified nucleoside
  modified_base order(1..19,24,26,28..32): mod_base = OTHER; note = 2-Prime-O-Methyl modified nucleoside
  modified_base order(1^2,23^24,31^32): mod_base = OTHER; note = (1,3-dimethylimidazolidin-2-ylidene) Phosphoramidate linkage
  modified_base order(2..23,24..31): mod_base = OTHER; note = Phosphorothioate linkage
  misc_feature 1..32: note = RM115525

SEQ ID NO: 881 - DNA, 32 bp, synthetic construct; identical to SEQ ID NO: 76
  source 1..32: mol_type = other DNA
  misc_feature 18..20: note = DNA
  misc_feature order(1..17,21..32): note = RNA
  modified_base 19: mod_base = OTHER; note = DNA nucleotide carrying a 6-amino-5-nitro-3-yl-2(1H)-pyridone nucleobase
  modified_base order(17,22,24): mod_base = OTHER; note = 2-Prime-Fluoro modified nucleoside
  modified_base order(1..16,21,23,25..32): mod_base = OTHER; note = 2-Prime-O-Methyl modified nucleoside
  modified_base order(1^2,20^21,31^32): mod_base = OTHER; note = (1,3-dimethylimidazolidin-2-ylidene) Phosphoramidate linkage
  modified_base order(2..20,21..31): mod_base = OTHER; note = Phosphorothioate linkage
  misc_feature 1..32: note = RM115526

SEQ ID NO: 882 - DNA, 32 bp, synthetic construct; identical to SEQ ID NO: 77
  source 1..32: mol_type = other DNA
  misc_feature 15..17: note = DNA
  misc_feature order(1..14,18..32): note = RNA
  modified_base 16: mod_base = OTHER; note = DNA nucleotide carrying a 6-amino-5-nitro-3-yl-2(1H)-pyridone nucleobase
  modified_base order(14,19,21): mod_base = OTHER; note = 2-Prime-Fluoro modified nucleoside
  modified_base order(1..13,18,20,22..32): mod_base = OTHER; note = 2-Prime-O-Methyl modified nucleoside
  modified_base order(1^2,17^18,31^32): mod_base = OTHER; note = (1,3-dimethylimidazolidin-2-ylidene) Phosphoramidate linkage
  modified_base order(2..17,18..31): mod_base = OTHER; note = Phosphorothioate linkage
  misc_feature 1..32: note = RM115527

SEQ ID NO: 883 - DNA, 32 bp, synthetic construct; identical to SEQ ID NO: 78
  source 1..32: mol_type = other DNA
  misc_feature 12..14: note = DNA
  misc_feature order(1..11,15..32): note = RNA
  modified_base 13: mod_base = OTHER; note = DNA nucleotide carrying a 6-amino-5-nitro-3-yl-2(1H)-pyridone nucleobase
  modified_base order(11,16,18): mod_base = OTHER; note = 2-Prime-Fluoro modified nucleoside
  modified_base order(1..10,15,17,19..32): mod_base = OTHER; note = 2-Prime-O-Methyl modified nucleoside
  modified_base order(1^2,14^15,31^32): mod_base = OTHER; note = (1,3-dimethylimidazolidin-2-ylidene) Phosphoramidate linkage
  modified_base order(2..14,15..31): mod_base = OTHER; note = Phosphorothioate linkage
  misc_feature 1..32: note = RM115528

SEQ ID NO: 884 - DNA, 32 bp, synthetic construct; identical to SEQ ID NO: 79
  source 1..32: mol_type = other DNA
  misc_feature 9..11: note = DNA
  misc_feature order(1..8,12..32): note = RNA
  modified_base 10: mod_base = OTHER; note = DNA nucleotide carrying a 6-amino-5-nitro-3-yl-2(1H)-pyridone nucleobase
  modified_base order(8,13,15): mod_base = OTHER; note = 2-Prime-Fluoro modified nucleoside
  modified_base order(1..7,12,14,16..32): mod_base = OTHER; note = 2-Prime-O-Methyl modified nucleoside
  modified_base order(1^2,11^12,31^32): mod_base = OTHER; note = (1,3-dimethylimidazolidin-2-ylidene) Phosphoramidate linkage
  modified_base order(2..11,12..31): mod_base = OTHER; note = Phosphorothioate linkage
  misc_feature 1..32: note = RM115529

SEQ ID NO: 885 - DNA, 32 bp, synthetic construct; identical to SEQ ID NO: 80
  source 1..32: mol_type = other DNA
  misc_feature 6..8: note = DNA
  misc_feature order(1..5,9..32): note = RNA
  modified_base 7: mod_base = OTHER; note = DNA nucleotide carrying a 6-amino-5-nitro-3-yl-2(1H)-pyridone nucleobase
  modified_base order(5,10,12): mod_base = OTHER; note = 2-Prime-Fluoro modified nucleoside
  modified_base order(1..4,9,11,13..32): mod_base = OTHER; note = 2-Prime-O-Methyl modified nucleoside
  modified_base order(1^2,8^9,31^32): mod_base = OTHER; note = (1,3-dimethylimidazolidin-2-ylidene) Phosphoramidate linkage
  modified_base order(2..8,9..31): mod_base = OTHER; note = Phosphorothioate linkage
  misc_feature 1..32: note = RM115530

SEQ ID NO: 886 - DNA, 32 bp, synthetic construct; identical to SEQ ID NO: 76
  source 1..32: mol_type = other DNA
  misc_feature 18..20: note = DNA
  misc_feature order(1..17,21..32): note = RNA
  modified_base 19: mod_base = OTHER; note = DNA nucleotide carrying a 6-amino-5-nitro-3-yl-2(1H)-pyridone nucleobase
  modified_base order(2,5,8,10,17,22,25,27,32): mod_base = OTHER; note = 2-Prime-Fluoro modified nucleoside
  modified_base order(1,3..4,6..7,9,11..16,21,23..24,26,28..31): mod_base = OTHER; note = 2-Prime-O-Methyl modified nucleoside
  modified_base order(1^2,20^21,31^32): mod_base = OTHER; note = (1,3-dimethylimidazolidin-2-ylidene) Phosphoramidate linkage
  modified_base order(2..20,21..31): mod_base = OTHER; note = Phosphorothioate linkage
  misc_feature 1..32: note = RM115531

SEQ ID NO: 887 - DNA, 32 bp, synthetic construct; identical to SEQ ID NO: 78
  source 1..32: mol_type = other DNA
  misc_feature 12..14: note = DNA
  misc_feature order(1..11,15..32): note = RNA
  modified_base 13: mod_base = OTHER; note = DNA nucleotide carrying a 6-amino-5-nitro-3-yl-2(1H)-pyridone nucleobase
  modified_base order(2,7,9,16..17,24,26,29,32): mod_base = OTHER; note = 2-Prime-Fluoro modified nucleoside
  modified_base order(1,3..6,8,10..11,15,18..23,25,27..28,30..31): mod_base = OTHER; note = 2-Prime-O-Methyl modified nucleoside
  modified_base order(1^2,14^15,31^32): mod_base = OTHER; note = (1,3-dimethylimidazolidin-2-ylidene) Phosphoramidate linkage
  modified_base order(2..14,15..31): mod_base = OTHER; note = Phosphorothioate linkage
  misc_feature 1..32: note = RM115532

SEQ ID NO: 888 - DNA, 23 bp, synthetic construct
  source 1..23: mol_type = other DNA
  misc_feature 14..16: note = DNA
  misc_feature order(1..13,17..23): note = RNA
  modified_base 15: mod_base = OTHER; note = DNA nucleotide carrying a 6-amino-5-nitro-3-yl-2(1H)-pyridone nucleobase
  modified_base order(1,4,6,13,18,21): mod_base = OTHER; note = 2-Prime-Fluoro modified nucleoside
  modified_base order(2..3,5,7..12,17,19..20,22..23): mod_base = OTHER; note = 2-Prime-O-Methyl modified nucleoside
  modified_base order(1^2,16^17,22^23): mod_base = OTHER; note = (1,3-dimethylimidazolidin-2-ylidene) Phosphoramidate linkage
  modified_base order(2..16,17..22): mod_base = OTHER; note = Phosphorothioate linkage
  misc_feature 1..23: note = RM115533
ttggcccttcgtctnatggacaa

SEQ ID NO: 889 - DNA, 32 bp, synthetic construct; identical to SEQ ID NO: 74
  source 1..32: mol_type = other DNA
  misc_feature 24..26: note = DNA
  misc_feature order(1..23,27..32): note = RNA
  modified_base 25: mod_base = OTHER; note = DNA nucleotide carrying a 6-amino-5-nitro-3-yl-2(1H)-pyridone nucleobase
  modified_base order(11,14,16,23,28,31): mod_base = OTHER; note = 2-Prime-Fluoro modified nucleoside
  modified_base order(1..10,12..13,15,17..22,27,29..30,32): mod_base = OTHER; note = 2-Prime-O-Methyl modified nucleoside
  modified_base order(1^2,26^27,31^32): mod_base = OTHER; note = (1,3-dimethylimidazolidin-2-ylidene) Phosphoramidate linkage
  modified_base order(2..26,27..31): mod_base = OTHER; note = Phosphorothioate linkage
  misc_feature 1..32: note = RM115534

SEQ ID NO: 890 - DNA, 32 bp, synthetic construct; identical to SEQ ID NO: 75
  source 1..32: mol_type = other DNA
  misc_feature 21..23: note = DNA
  misc_feature order(1..20,24..32): note = RNA
  modified_base 22: mod_base = OTHER; note = DNA nucleotide carrying a 6-amino-5-nitro-3-yl-2(1H)-pyridone nucleobase
  modified_base order(8,11,13,20,25,28): mod_base = OTHER; note = 2-Prime-Fluoro modified nucleoside
  modified_base order(1..7,9..10,12,14..19,24,26..27,29..32): mod_base = OTHER; note = 2-Prime-O-Methyl modified nucleoside
  modified_base order(1^2,23^24,31^32): mod_base = OTHER; note = (1,3-dimethylimidazolidin-2-ylidene) Phosphoramidate linkage
  modified_base order(2..23,24..31): mod_base = OTHER; note = Phosphorothioate linkage
  misc_feature 1..32: note = RM115535

SEQ ID NO: 891 - DNA, 32 bp, synthetic construct; identical to SEQ ID NO: 76
  source 1..32: mol_type = other DNA
  misc_feature 18..20: note = DNA
  misc_feature order(1..17,21..32): note = RNA
  modified_base 19: mod_base = OTHER; note = DNA nucleotide carrying a 6-amino-5-nitro-3-yl-2(1H)-pyridone nucleobase
  modified_base order(5,8,10,17,22,25): mod_base = OTHER; note = 2-Prime-Fluoro modified nucleoside
  modified_base order(1..4,6..7,9,11..16,21,23..24,26..32): mod_base = OTHER; note = 2-Prime-O-Methyl modified nucleoside
  modified_base order(1^2,20^21,31^32): mod_base = OTHER; note = (1,3-dimethylimidazolidin-2-ylidene) Phosphoramidate linkage
  modified_base order(2..20,21..31): mod_base = OTHER; note = Phosphorothioate linkage
  misc_feature 1..32: note = RM115536

SEQ ID NO: 892 - DNA, 32 bp, synthetic construct; identical to SEQ ID NO: 77
  source 1..32: mol_type = other DNA
  misc_feature 15..17: note = DNA
  misc_feature order(1..14,18..32): note = RNA
  modified_base 16: mod_base = OTHER; note = DNA nucleotide carrying a 6-amino-5-nitro-3-yl-2(1H)-pyridone nucleobase
  modified_base order(2,5,7,14,19,22): mod_base = OTHER; note = 2-Prime-Fluoro modified nucleoside
  modified_base order(1,3..4,6,8..13,18,20..21,23..32): mod_base = OTHER; note = 2-Prime-O-Methyl modified nucleoside
  modified_base order(1^2,17^18,31^32): mod_base = OTHER; note = (1,3-dimethylimidazolidin-2-ylidene) Phosphoramidate linkage
  modified_base order(2..17,18..31): mod_base = OTHER; note = Phosphorothioate linkage
  misc_feature 1..32: note = RM115537

SEQ ID NO: 893 - DNA, 23 bp, synthetic construct
  source 1..23: mol_type = other DNA
  misc_feature 5..7: note = DNA
  misc_feature order(1..4,8..23): note = RNA
  modified_base 6: mod_base = OTHER; note = DNA nucleotide carrying a 6-amino-5-nitro-3-yl-2(1H)-pyridone nucleobase
  modified_base order(2,9..10,17,19,22): mod_base = OTHER; note = 2-Prime-Fluoro modified nucleoside
  modified_base order(1,3..4,8,11..16,18,20..21,23): mod_base = OTHER; note = 2-Prime-O-Methyl modified nucleoside
  modified_base order(1^2,7^8,22^23): mod_base = OTHER; note = (1,3-dimethylimidazolidin-2-ylidene) Phosphoramidate linkage
  modified_base order(2..7,8..22): mod_base = OTHER; note = Phosphorothioate linkage
  misc_feature 1..23: note = RM115538
cgtctnatggacaaagtctttaa

SEQ ID NO: 894 - DNA, 32 bp, synthetic construct; identical to SEQ ID NO: 77
  source 1..32: mol_type = other DNA
  misc_feature 15..17: note = DNA
  misc_feature order(1..14,18..32): note = RNA
  modified_base 16: mod_base = OTHER; note = DNA nucleotide carrying a 6-amino-5-nitro-3-yl-2(1H)-pyridone nucleobase
  modified_base order(12,19..20,27,29,32): mod_base = OTHER; note = 2-Prime-Fluoro modified nucleoside
  modified_base order(1..11,13..14,18,21..26,28,30..31): mod_base = OTHER; note = 2-Prime-O-Methyl modified nucleoside
  modified_base order(1^2,17^18,31^32): mod_base = OTHER; note = (1,3-dimethylimidazolidin-2-ylidene) Phosphoramidate linkage
  modified_base order(2..17,18..31): mod_base = OTHER; note = Phosphorothioate linkage
  misc_feature 1..32: note = RM115539

SEQ ID NO: 895 - DNA, 32 bp, synthetic construct; identical to SEQ ID NO: 78
  source 1..32: mol_type = other DNA
  misc_feature 12..14: note = DNA
  misc_feature order(1..11,15..32): note = RNA
  modified_base 13: mod_base = OTHER; note = DNA nucleotide carrying a 6-amino-5-nitro-3-yl-2(1H)-pyridone nucleobase
  modified_base order(9,16..17,24,26,29): mod_base = OTHER; note = 2-Prime-Fluoro modified nucleoside
  modified_base order(1..8,10..11,15,18..23,25,27..28,30..32): mod_base = OTHER; note = 2-Prime-O-Methyl modified nucleoside
  modified_base order(1^2,14^15,31^32): mod_base = OTHER; note = (1,3-dimethylimidazolidin-2-ylidene) Phosphoramidate linkage
  modified_base order(2..14,15..31): mod_base = OTHER; note = Phosphorothioate linkage
  misc_feature 1..32: note = RM115540

SEQ ID NO: 896 - DNA, 32 bp, synthetic construct; identical to SEQ ID NO: 79
  source 1..32: mol_type = other DNA
  misc_feature 9..11: note = DNA
  misc_feature order(1..8,12..32): note = RNA
  modified_base 10: mod_base = OTHER; note = DNA nucleotide carrying a 6-amino-5-nitro-3-yl-2(1H)-pyridone nucleobase
  modified_base order(6,13..14,21,23,26): mod_base = OTHER; note = 2-Prime-Fluoro modified nucleoside
  modified_base order(1..5,7..8,12,15..20,22,24..25,27..32): mod_base = OTHER; note = 2-Prime-O-Methyl modified nucleoside
  modified_base order(1^2,11^12,31^32): mod_base = OTHER; note = (1,3-dimethylimidazolidin-2-ylidene) Phosphoramidate linkage
  modified_base order(2..11,12..31): mod_base = OTHER; note = Phosphorothioate linkage
  misc_feature 1..32: note = RM115541

SEQ ID NO: 897 - DNA, 32 bp, synthetic construct; identical to SEQ ID NO: 80
  source 1..32: mol_type = other DNA
  misc_feature 6..8: note = DNA
  misc_feature order(1..5,9..32): note = RNA
  modified_base 7: mod_base = OTHER; note = DNA nucleotide carrying a 6-amino-5-nitro-3-yl-2(1H)-pyridone nucleobase
  modified_base order(3,10..11,18,20,23): mod_base = OTHER; note = 2-Prime-Fluoro modified nucleoside
  modified_base order(1..2,4..5,9,12..17,19,21..22,24..32): mod_base = OTHER; note = 2-Prime-O-Methyl modified nucleoside
  modified_base order(1^2,8^9,31^32): mod_base = OTHER; note = (1,3-dimethylimidazolidin-2-ylidene) Phosphoramidate linkage
  modified_base order(2..8,9..31): mod_base = OTHER; note = Phosphorothioate linkage
  misc_feature 1..32: note = RM115542

SEQ ID NO: 898 - DNA, 32 bp, synthetic construct; identical to SEQ ID NO: 74
  source 1..32: mol_type = other DNA
  misc_feature 24..26: note = DNA
  misc_feature order(1..23,27..32): note = RNA
  modified_base 25: mod_base = OTHER; note = DNA nucleotide carrying a 6-amino-5-nitro-3-yl-2(1H)-pyridone nucleobase
  modified_base order(23,28,31): mod_base = OTHER; note = 2-Prime-Fluoro modified nucleoside
  modified_base order(1..22,27,29..30,32): mod_base = OTHER; note = 2-Prime-O-Methyl modified nucleoside
  modified_base order(1^2,26^27,31^32): mod_base = OTHER; note = (1,3-dimethylimidazolidin-2-ylidene) Phosphoramidate linkage
  modified_base order(2..26,27..31): mod_base = OTHER; note = Phosphorothioate linkage
  misc_feature 1..32: note = RM115543

SEQ ID NO: 899 - DNA, 32 bp, synthetic construct; identical to SEQ ID NO: 75
  source 1..32: mol_type = other DNA
  misc_feature 21..23: note = DNA
  misc_feature order(1..20,24..32): note = RNA
  modified_base 22: mod_base = OTHER; note = DNA nucleotide carrying a 6-amino-5-nitro-3-yl-2(1H)-pyridone nucleobase
  modified_base order(20,25,28): mod_base = OTHER; note = 2-Prime-Fluoro modified nucleoside
  modified_base order(1..19,24,26..27,29..32): mod_base = OTHER; note = 2-Prime-O-Methyl modified nucleoside
  modified_base order(1^2,23^24,31^32): mod_base = OTHER; note = (1,3-dimethylimidazolidin-2-ylidene) Phosphoramidate linkage
  modified_base order(2..23,24..31): mod_base = OTHER; note = Phosphorothioate linkage
  misc_feature 1..32: note = RM115544

SEQ ID NO: 900 - DNA, 32 bp, synthetic construct; identical to SEQ ID NO: 76
  source 1..32: mol_type = other DNA
  misc_feature 18..20: note = DNA
  misc_feature order(1..17,21..32): note = RNA
  modified_base 19: mod_base = OTHER; note = DNA nucleotide carrying a 6-amino-5-nitro-3-yl-2(1H)-pyridone nucleobase
  modified_base order(17,22,25): mod_base = OTHER; note = 2-Prime-Fluoro modified nucleoside
  modified_base order(1..16,21,23..24,26..32): mod_base = OTHER; note = 2-Prime-O-Methyl modified nucleoside
  modified_base order(1^2,20^21,31^32): mod_base = OTHER; note = (1,3-dimethylimidazolidin-2-ylidene) Phosphoramidate linkage
  modified_base order(2..20,21..31): mod_base = OTHER; note = Phosphorothioate linkage
  misc_feature 1..32: note = RM115545

SEQ ID NO: 901 - DNA, 32 bp, synthetic construct; identical to SEQ ID NO: 77
  source 1..32: mol_type = other DNA
  misc_feature 15..17: note = DNA
  misc_feature order(1..14,18..32): note = RNA
  modified_base 16: mod_base = OTHER; note = DNA nucleotide carrying a 6-amino-5-nitro-3-yl-2(1H)-pyridone nucleobase
  modified_base order(14,19,22): mod_base = OTHER; note = 2-Prime-Fluoro modified nucleoside
  modified_base order(1..13,18,20..21,23..32): mod_base = OTHER; note = 2-Prime-O-Methyl modified nucleoside
  modified_base order(1^2,17^18,31^32): mod_base = OTHER; note = (1,3-dimethylimidazolidin-2-ylidene) Phosphoramidate linkage
  modified_base order(2..17,18..31): mod_base = OTHER; note = Phosphorothioate linkage
  misc_feature 1..32: note = RM115546

SEQ ID NO: 902 - DNA, 32 bp, synthetic construct; identical to SEQ ID NO: 78
  source 1..32: mol_type = other DNA
  misc_feature 12..14: note = DNA
  misc_feature order(1..11,15..32): note = RNA
  modified_base 13: mod_base = OTHER; note = DNA nucleotide carrying a 6-amino-5-nitro-3-yl-2(1H)-pyridone nucleobase
  modified_base order(11,16,19): mod_base = OTHER; note = 2-Prime-Fluoro modified nucleoside
  modified_base order(1..10,15,17..18,20..32): mod_base = OTHER; note = 2-Prime-O-Methyl modified nucleoside
  modified_base order(1^2,14^15,31^32): mod_base = OTHER; note = (1,3-dimethylimidazolidin-2-ylidene) Phosphoramidate linkage
  modified_base order(2..14,15..31): mod_base = OTHER; note = Phosphorothioate linkage
  misc_feature 1..32: note = RM115547

SEQ ID NO: 903 - DNA, 32 bp, synthetic construct; identical to SEQ ID NO: 79
  source 1..32: mol_type = other DNA
  misc_feature 9..11: note = DNA
  misc_feature order(1..8,12..32): note = RNA
  modified_base 10: mod_base = OTHER; note = DNA nucleotide carrying a 6-amino-5-nitro-3-yl-2(1H)-pyridone nucleobase
  modified_base order(8,13,16): mod_base = OTHER; note = 2-Prime-Fluoro modified nucleoside
  modified_base order(1..7,12,14..15,17..32): mod_base = OTHER; note = 2-Prime-O-Methyl modified nucleoside
  modified_base order(1^2,11^12,31^32): mod_base = OTHER; note = (1,3-dimethylimidazolidin-2-ylidene) Phosphoramidate linkage
  modified_base order(2..11,12..31): mod_base = OTHER; note = Phosphorothioate linkage
  misc_feature 1..32: note = RM115548

SEQ ID NO: 904 - DNA, 32 bp, synthetic construct; identical to SEQ ID NO: 80
  source 1..32: mol_type = other DNA
  misc_feature 6..8: note = DNA
  misc_feature order(1..5,9..32): note = RNA
  modified_base 7: mod_base = OTHER; note = DNA nucleotide carrying a 6-amino-5-nitro-3-yl-2(1H)-pyridone nucleobase
  modified_base order(5,10,13): mod_base = OTHER; note = 2-Prime-Fluoro modified nucleoside
  modified_base order(1..4,9,11..12,14..32): mod_base = OTHER; note = 2-Prime-O-Methyl modified nucleoside
  modified_base order(1^2,8^9,31^32): mod_base = OTHER; note = (1,3-dimethylimidazolidin-2-ylidene) Phosphoramidate linkage
  modified_base order(2..8,9..31): mod_base = OTHER; note = Phosphorothioate linkage
  misc_feature 1..32: note = RM115549

SEQ ID NO: 905 - DNA, 32 bp, synthetic construct; identical to SEQ ID NO: 73
  source 1..32: mol_type = other DNA
  misc_feature 27..29: note = DNA
  misc_feature order(1..26,30..32): note = RNA
  modified_base 28: mod_base = OTHER; note = DNA nucleotide carrying a 6-amino-5-nitro-3-yl-2(1H)-pyridone nucleobase
  modified_base order(24,31..32): mod_base = OTHER; note = 2-Prime-Fluoro modified nucleoside
  modified_base order(1..23,25..26,30): mod_base = OTHER; note = 2-Prime-O-Methyl modified nucleoside
  modified_base order(1^2,29^30,31^32): mod_base = OTHER; note = (1,3-dimethylimidazolidin-2-ylidene) Phosphoramidate linkage
  modified_base order(2..29,30^31): mod_base = OTHER; note = Phosphorothioate linkage
  misc_feature 1..32: note = RM115550

SEQ ID NO: 906 - DNA, 32 bp, synthetic construct; identical to SEQ ID NO: 74
  source 1..32: mol_type = other DNA
  misc_feature 24..26: note = DNA
  misc_feature order(1..23,27..32): note = RNA
  modified_base 25: mod_base = OTHER; note = DNA nucleotide carrying a 6-amino-5-nitro-3-yl-2(1H)-pyridone nucleobase
  modified_base order(21,28..29): mod_base = OTHER; note = 2-Prime-Fluoro modified nucleoside
  modified_base order(1..20,22..23,27,30..32): mod_base = OTHER; note = 2-Prime-O-Methyl modified nucleoside
  modified_base order(1^2,26^27,31^32): mod_base = OTHER; note = (1,3-dimethylimidazolidin-2-ylidene) Phosphoramidate linkage
  modified_base order(2..26,27..31): mod_base = OTHER; note = Phosphorothioate linkage
  misc_feature 1..32: note = RM115551

SEQ ID NO: 907 - DNA, 32 bp, synthetic construct; identical to SEQ ID NO: 75
  source 1..32: mol_type = other DNA
  misc_feature 21..23: note = DNA
  misc_feature order(1..20,24..32): note = RNA
  modified_base 22: mod_base = OTHER; note = DNA nucleotide carrying a 6-amino-5-nitro-3-yl-2(1H)-pyridone nucleobase
  modified_base order(18,25..26): mod_base = OTHER; note = 2-Prime-Fluoro modified nucleoside
  modified_base order(1..17,19..20,24,27..32): mod_base = OTHER; note = 2-Prime-O-Methyl modified nucleoside
  modified_base order(1^2,23^24,31^32): mod_base = OTHER; note = (1,3-dimethylimidazolidin-2-ylidene) Phosphoramidate linkage
  modified_base order(2..23,24..31): mod_base = OTHER; note = Phosphorothioate linkage
  misc_feature 1..32: note = RM115552

SEQ ID NO: 908 - DNA, 32 bp, synthetic construct; identical to SEQ ID NO: 76
  source 1..32: mol_type = other DNA
  misc_feature 18..20: note = DNA
  misc_feature order(1..17,21..32): note = RNA
  modified_base 19: mod_base = OTHER; note = DNA nucleotide carrying a 6-amino-5-nitro-3-yl-2(1H)-pyridone nucleobase
  modified_base order(15,22..23): mod_base = OTHER; note = 2-Prime-Fluoro modified nucleoside
  modified_base order(1..14,16..17,21,24..32): mod_base = OTHER; note = 2-Prime-O-Methyl modified nucleoside
  modified_base order(1^2,20^21,31^32): mod_base = OTHER; note = (1,3-dimethylimidazolidin-2-ylidene) Phosphoramidate linkage
  modified_base order(2..20,21..31): mod_base = OTHER; note = Phosphorothioate linkage
  misc_feature 1..32: note = RM115553

SEQ ID NO: 909 - DNA, 32 bp, synthetic construct; identical to SEQ ID NO: 77
  source 1..32: mol_type = other DNA
  misc_feature 15..17: note = DNA
  misc_feature order(1..14,18..32): note = RNA
  modified_base 16: mod_base = OTHER; note = DNA nucleotide carrying a 6-amino-5-nitro-3-yl-2(1H)-pyridone nucleobase
  modified_base order(12,19..20): mod_base = OTHER; note = 2-Prime-Fluoro modified nucleoside
  modified_base order(1..11,13..14,18,21..32): mod_base = OTHER; note = 2-Prime-O-Methyl modified nucleoside
  modified_base order(1^2,17^18,31^32): mod_base = OTHER; note = (1,3-dimethylimidazolidin-2-ylidene) Phosphoramidate linkage
  modified_base order(2..17,18..31): mod_base = OTHER; note = Phosphorothioate linkage
  misc_feature 1..32: note = RM115554

SEQ ID NO: 910 - DNA, 32 bp, synthetic construct; identical to SEQ ID NO: 78
  source 1..32: mol_type = other DNA
  misc_feature 12..14: note = DNA
  misc_feature order(1..11,15..32): note = RNA
  modified_base 13: mod_base = OTHER; note = DNA nucleotide carrying a 6-amino-5-nitro-3-yl-2(1H)-pyridone nucleobase
  modified_base order(9,16..17): mod_base = OTHER; note = 2-Prime-Fluoro modified nucleoside
  modified_base order(1..8,10..11,15,18..32): mod_base = OTHER; note = 2-Prime-O-Methyl modified nucleoside
  modified_base order(1^2,14^15,31^32): mod_base = OTHER; note = (1,3-dimethylimidazolidin-2-ylidene) Phosphoramidate linkage
  modified_base order(2..14,15..31): mod_base = OTHER; note = Phosphorothioate linkage
  misc_feature 1..32: note = RM115555

SEQ ID NO: 911 - DNA, 32 bp, synthetic construct; identical to SEQ ID NO: 79
  source 1..32: mol_type = other DNA
  misc_feature 9..11: note = DNA
  misc_feature order(1..8,12..32): note = RNA
  modified_base 10: mod_base = OTHER; note = DNA nucleotide carrying a 6-amino-5-nitro-3-yl-2(1H)-pyridone nucleobase
  modified_base order(6,13..14): mod_base = OTHER; note = 2-Prime-Fluoro modified nucleoside
  modified_base order(1..5,7..8,12,15..32): mod_base = OTHER; note = 2-Prime-O-Methyl modified nucleoside
  modified_base order(1^2,11^12,31^32): mod_base = OTHER; note = (1,3-dimethylimidazolidin-2-ylidene) Phosphoramidate linkage
  modified_base order(2..11,12..31): mod_base = OTHER; note = Phosphorothioate linkage
  misc_feature 1..32: note = RM115556

SEQ ID NO: 912 - DNA, 32 bp, synthetic construct; identical to SEQ ID NO: 80
  source 1..32: mol_type = other DNA
  misc_feature 6..8: note = DNA
  misc_feature order(1..5,9..32): note = RNA
  modified_base 7: mod_base = OTHER; note = DNA nucleotide carrying a 6-amino-5-nitro-3-yl-2(1H)-pyridone nucleobase
  modified_base order(3,10..11): mod_base = OTHER; note = 2-Prime-Fluoro modified nucleoside
  modified_base order(1..2,4..5,9,12..32): mod_base = OTHER; note = 2-Prime-O-Methyl modified nucleoside
  modified_base order(1^2,8^9,31^32): mod_base = OTHER; note = (1,3-dimethylimidazolidin-2-ylidene) Phosphoramidate linkage
  modified_base order(2..8,9..31): mod_base = OTHER; note = Phosphorothioate linkage
  misc_feature 1..32: note = RM115557

SEQ ID NO: 913 - DNA, 32 bp, synthetic construct; identical to SEQ ID NO: 79
  source 1..32: mol_type = other DNA
  misc_feature 9..11: note = DNA
  misc_feature order(1..8,12..32): note = RNA
  modified_base 10: mod_base = OTHER; note = DNA nucleotide carrying a 6-amino-5-nitro-3-yl-2(1H)-pyridone nucleobase
  modified_base order(3,13..14,24,29..30): mod_base = OTHER; note = 2-Prime-Fluoro modified nucleoside
  modified_base order(1..2,4..8,12,15..23,25..28,31..32): mod_base = OTHER; note = 2-Prime-O-Methyl modified nucleoside
  modified_base order(1^2,11^12,31^32): mod_base = OTHER; note = (1,3-dimethylimidazolidin-2-ylidene) Phosphoramidate linkage
  modified_base order(2..11,12..31): mod_base = OTHER; note = Phosphorothioate linkage
  misc_feature 1..32: note = RM115558

SEQ ID NO: 914 - DNA, 32 bp, synthetic construct; identical to SEQ ID NO: 75
  source 1..32: mol_type = other DNA
  misc_feature 21..23: note = DNA
  misc_feature order(1..20,24..32): note = RNA
  modified_base 22: mod_base = OTHER; note = DNA nucleotide carrying a 6-amino-5-nitro-3-yl-2(1H)-pyridone nucleobase
  modified_base order(4..5,10,20,25,31): mod_base = OTHER; note = 2-Prime-Fluoro modified nucleoside
  modified_base order(1..3,6..9,11..19,24,26..30,32): mod_base = OTHER; note = 2-Prime-O-Methyl modified nucleoside
  modified_base order(1^2,23^24,31^32): mod_base = OTHER; note = (1,3-dimethylimidazolidin-2-ylidene) Phosphoramidate linkage
  modified_base order(2..23,24..31): mod_base = OTHER; note = Phosphorothioate linkage
  misc_feature 1..32: note = RM115559

SEQ ID NO: 915 - DNA, 32 bp, synthetic construct; identical to SEQ ID NO: 76
  source 1..32: mol_type = other DNA
  misc_feature 18..20: note = DNA
  misc_feature order(1..17,21..32): note = RNA
  modified_base 19: mod_base = OTHER; note = DNA nucleotide carrying a 6-amino-5-nitro-3-yl-2(1H)-pyridone nucleobase
  modified_base order(1..2,7,17,22,28): mod_base = OTHER; note = 2-Prime-Fluoro modified nucleoside
  modified_base order(3..6,8..16,21,23..27,29..32): mod_base = OTHER; note = 2-Prime-O-Methyl modified nucleoside
  modified_base order(1^2,20^21,31^32): mod_base = OTHER; note = (1,3-dimethylimidazolidin-2-ylidene) Phosphoramidate linkage
  modified_base order(2..20,21..31): mod_base = OTHER; note = Phosphorothioate linkage
  misc_feature 1..32: note = RM115560

SEQ ID NO: 916 - DNA, 23 bp, synthetic construct
  source 1..23: mol_type = other DNA
  misc_feature 8..10: note = DNA
  misc_feature order(1..7,11..23): note = RNA
  modified_base 9: mod_base = OTHER; note = DNA nucleotide carrying a 6-amino-5-nitro-3-yl-2(1H)-pyridone nucleobase
  modified_base order(2,12..13,23): mod_base = OTHER; note = 2-Prime-Fluoro modified nucleoside
  modified_base order(1,3..7,11,14..22): mod_base = OTHER; note = 2-Prime-O-Methyl modified nucleoside
  modified_base order(1^2,10^11,22^23): mod_base = OTHER; note = (1,3-dimethylimidazolidin-2-ylidene) Phosphoramidate linkage
  modified_base order(2..10,11..22): mod_base = OTHER; note = Phosphorothioate linkage
  misc_feature 1..23: note = RM115561
cttcgtctnatggacaaagtctt

SEQ ID NO: 917 - DNA, 23 bp, synthetic construct
  source 1..23: mol_type = other DNA
  misc_feature 17..19: note = DNA
  misc_feature order(1..16,20..23): note = RNA
  modified_base 18: mod_base = OTHER; note = DNA nucleotide carrying a 6-amino-5-nitro-3-yl-2(1H)-pyridone nucleobase
  modified_base order(11,21): mod_base = OTHER; note = 2-Prime-Fluoro modified nucleoside
  modified_base order(1..10,12..16,20,22..23): mod_base = OTHER; note = 2-Prime-O-Methyl modified nucleoside
  modified_base order(1^2,19^20,22^23): mod_base = OTHER; note = (1,3-dimethylimidazolidin-2-ylidene) Phosphoramidate linkage
  modified_base order(2..19,20..22): mod_base = OTHER; note = Phosphorothioate linkage
  misc_feature 1..23: note = RM115562
aatttggcccttcgtctnatgga

SEQ ID NO: 918 - DNA, 23 bp, synthetic construct
  source 1..23: mol_type = other DNA
  misc_feature 14..16: note = DNA
  misc_feature order(1..13,17..23): note = RNA
  modified_base 15: mod_base = OTHER; note = DNA nucleotide carrying a 6-amino-5-nitro-3-yl-2(1H)-pyridone nucleobase
  modified_base order(8,18): mod_base = OTHER; note = 2-Prime-Fluoro modified nucleoside
  modified_base order(1..7,9..13,17,19..23): mod_base = OTHER; note = 2-Prime-O-Methyl modified nucleoside
  modified_base order(1^2,16^17,22^23): mod_base = OTHER; note = (1,3-dimethylimidazolidin-2-ylidene) Phosphoramidate linkage
  modified_base order(2..16,17..22): mod_base = OTHER; note = Phosphorothioate linkage
  misc_feature 1..23: note = RM115563
ttggcccttcgtctnatggacaa

SEQ ID NO: 919 - DNA, 23 bp, synthetic construct
  source 1..23: mol_type = other DNA
  misc_feature 11..13: note = DNA
  misc_feature order(1..10,14..23): note = RNA
  modified_base 12: mod_base = OTHER; note = DNA nucleotide carrying a 6-amino-5-nitro-3-yl-2(1H)-pyridone nucleobase
  modified_base order(5,15): mod_base = OTHER; note = 2-Prime-Fluoro modified nucleoside
  modified_base order(1..4,6..10,14,16..23): mod_base = OTHER; note = 2-Prime-O-Methyl modified nucleoside
  modified_base order(1^2,13^14,22^23): mod_base = OTHER; note = (1,3-dimethylimidazolidin-2-ylidene) Phosphoramidate linkage
  modified_base order(2..13,14..22): mod_base = OTHER; note = Phosphorothioate linkage
  misc_feature 1..23: note = RM115564
gcccttcgtctnatggacaaagt

SEQ ID NO: 920 - DNA, 23 bp, synthetic construct
  source 1..23: mol_type = other DNA
  misc_feature 8..10: note = DNA
  misc_feature order(1..7,11..23): note = RNA
  modified_base 9: mod_base = OTHER; note = DNA nucleotide carrying a 6-amino-5-nitro-3-yl-2(1H)-pyridone nucleobase
  modified_base order(2,12): mod_base = OTHER; note = 2-Prime-Fluoro modified nucleoside
  modified_base order(1,3..7,11,13..23): mod_base = OTHER; note = 2-Prime-O-Methyl modified nucleoside
  modified_base order(1^2,10^11,22^23): mod_base = OTHER; note = (1,3-dimethylimidazolidin-2-ylidene) Phosphoramidate linkage
  modified_base order(2..10,11..22): mod_base = OTHER; note = Phosphorothioate linkage
  misc_feature 1..23: note = RM115565
cttcgtctnatggacaaagtctt

SEQ ID NO: 921 - DNA, 26 bp, synthetic construct
  source 1..26: mol_type = other DNA
  misc_feature 21..23: note = DNA
  misc_feature order(1..20,24..26): note = RNA
  modified_base 22: mod_base = OTHER; note = DNA nucleotide carrying a 6-amino-5-nitro-3-yl-2(1H)-pyridone nucleobase
  modified_base order(15,25): mod_base = OTHER; note = 2-Prime-Fluoro modified nucleoside
  modified_base order(1..14,16..20,24,26): mod_base = OTHER; note = 2-Prime-O-Methyl modified nucleoside
  modified_base order(1^2,23^24,25^26): mod_base = OTHER; note = (1,3-dimethylimidazolidin-2-ylidene) Phosphoramidate linkage
  modified_base order(2..23,24^25): mod_base = OTHER; note = Phosphorothioate linkage
  misc_feature 1..26: note = RM115566
cattaatttggcccttcgtctnatgg

SEQ ID NO: 922 - DNA, 26 bp, synthetic construct
  source 1..26: mol_type = other DNA
  misc_feature 18..20: note = DNA
  misc_feature order(1..17,21..26): note = RNA
  modified_base 19: mod_base = OTHER; note = DNA nucleotide carrying a 6-amino-5-nitro-3-yl-2(1H)-pyridone nucleobase
  modified_base order(12,22): mod_base = OTHER; note = 2-Prime-Fluoro modified nucleoside
  modified_base order(1..11,13..17,21,23..26): mod_base = OTHER; note = 2-Prime-O-Methyl modified nucleoside
  modified_base order(1^2,20^21,25^26): mod_base = OTHER; note = (1,3-dimethylimidazolidin-2-ylidene) Phosphoramidate linkage
  modified_base order(2..20,21..25): mod_base = OTHER; note = Phosphorothioate linkage
  misc_feature 1..26: note = RM115567
taatttggcccttcgtctnatggaca

SEQ ID NO: 923 - DNA, 26 bp, synthetic construct
  source 1..26: mol_type = other DNA
  misc_feature 15..17: note = DNA
  misc_feature order(1..14,18..26): note = RNA
  modified_base 16: mod_base = OTHER; note = DNA nucleotide carrying a 6-amino-5-nitro-3-yl-2(1H)-pyridone nucleobase
  modified_base order(9,19): mod_base = OTHER; note = 2-Prime-Fluoro modified nucleoside
  modified_base order(1..8,10..14,18,20..26): mod_base = OTHER; note = 2-Prime-O-Methyl modified nucleoside
  modified_base order(1^2,17^18,25^26): mod_base = OTHER; note = (1,3-dimethylimidazolidin-2-ylidene) Phosphoramidate linkage
  modified_base order(2..17,18..25): mod_base = OTHER; note = Phosphorothioate linkage
  misc_feature 1..26: note = RM115568
tttggcccttcgtctnatggacaaag

SEQ ID NO: 924 - DNA, 26 bp, synthetic construct
  source 1..26: mol_type = other DNA
  misc_feature 12..14: note = DNA
  misc_feature order(1..11,15..26): note = RNA
  modified_base 13: mod_base = OTHER; note = DNA nucleotide carrying a 6-amino-5-nitro-3-yl-2(1H)-pyridone nucleobase
  modified_base order(6,16): mod_base = OTHER; note = 2-Prime-Fluoro modified nucleoside
  modified_base order(1..5,7..11,15,17..26): mod_base = OTHER; note = 2-Prime-O-Methyl modified nucleoside
  modified_base order(1^2,14^15,25^26): mod_base = OTHER; note = (1,3-dimethylimidazolidin-2-ylidene) Phosphoramidate linkage
  modified_base order(2..14,15..25): mod_base = OTHER; note = Phosphorothioate linkage
  misc_feature 1..26: note = RM115569
ggcccttcgtctnatggacaaagtct

SEQ ID NO: 925 - DNA, 26 bp, synthetic construct
  source 1..26: mol_type = other DNA
  misc_feature 9..11: note = DNA
  misc_feature order(1..8,12..26): note = RNA
  modified_base 10: mod_base = OTHER; note = DNA nucleotide carrying a 6-amino-5-nitro-3-yl-2(1H)-pyridone nucleobase
  modified_base order(3,13): mod_base = OTHER; note = 2-Prime-Fluoro modified nucleoside
  modified_base order(1..2,4..8,12,14..26): mod_base = OTHER; note = 2-Prime-O-Methyl modified nucleoside
  modified_base order(1^2,11^12,25^26): mod_base = OTHER; note = (1,3-dimethylimidazolidin-2-ylidene) Phosphoramidate linkage
  modified_base order(2..11,12..25): mod_base = OTHER; note = Phosphorothioate linkage
  misc_feature 1..26: note = RM115570
ccttcgtctnatggacaaagtcttta

SEQ ID NO: 926 - DNA, 29 bp, synthetic construct
  source 1..29: mol_type = other DNA
  misc_feature 23..25: note = DNA
  misc_feature order(1..22,26..29): note = RNA
  modified_base 24: mod_base = OTHER; note = DNA nucleotide carrying a 6-amino-5-nitro-3-yl-2(1H)-pyridone nucleobase
  modified_base order(17,27): mod_base = OTHER; note = 2-Prime-Fluoro modified nucleoside
  modified_base order(1..16,18..22,26,28..29): mod_base = OTHER; note = 2-Prime-O-Methyl modified nucleoside
  modified_base order(1^2,25^26,28^29): mod_base = OTHER; note = (1,3-dimethylimidazolidin-2-ylidene) Phosphoramidate linkage
  modified_base order(2..25,26..28): mod_base = OTHER; note = Phosphorothioate linkage
  misc_feature 1..29: note = RM115571
gtcattaatttggcccttcgtctnatgga

SEQ ID NO: 927 - DNA, 29 bp, synthetic construct
  source 1..29: mol_type = other DNA
  misc_feature 20..22: note = DNA
  misc_feature order(1..19,23..29): note = RNA
  modified_base 21: mod_base = OTHER; note = DNA nucleotide carrying a 6-amino-5-nitro-3-yl-2(1H)-pyridone nucleobase
  modified_base order(14,24): mod_base = OTHER; note = 2-Prime-Fluoro modified nucleoside
  modified_base order(1..13,15..19,23,25..29): mod_base = OTHER; note = 2-Prime-O-Methyl modified nucleoside
  modified_base order(1^2,22^23,28^29): mod_base = OTHER; note = (1,3-dimethylimidazolidin-2-ylidene) Phosphoramidate linkage
  modified_base order(2..22,23..28): mod_base = OTHER; note = Phosphorothioate linkage
  misc_feature 1..29: note = RM115572
attaatttggcccttcgtctnatggacaa

SEQ ID NO: 928 - DNA, 29 bp, synthetic construct
  source 1..29: mol_type = other DNA
  misc_feature 17..19: note = DNA
  misc_feature order(1..16,20..29): note = RNA
  modified_base 18: mod_base = OTHER; note = DNA nucleotide carrying a 6-amino-5-nitro-3-yl-2(1H)-pyridone nucleobase
  modified_base order(11,21): mod_base = OTHER; note = 2-Prime-Fluoro modified nucleoside
  modified_base order(1..10,12..16,20,22..29): mod_base = OTHER; note = 2-Prime-O-Methyl modified nucleoside
  modified_base order(1^2,19^20,28^29): mod_base = OTHER; note = (1,3-dimethylimidazolidin-2-ylidene) Phosphoramidate linkage
  modified_base order(2..19,20..28): mod_base = OTHER; note = Phosphorothioate linkage
  misc_feature 1..29: note = RM115573
aatttggcccttcgtctnatggacaaagt

SEQ ID NO: 929 - DNA, 29 bp, synthetic construct
  source 1..29: mol_type = other DNA
  misc_feature 14..16: note = DNA
  misc_feature order(1..13,17..29): note = RNA
  modified_base 15: mod_base = OTHER; note = DNA nucleotide carrying a 6-amino-5-nitro-3-yl-2(1H)-pyridone nucleobase
  modified_base order(8,18): mod_base = OTHER; note = 2-Prime-Fluoro modified nucleoside
  modified_base order(1..7,9..13,17,19..29): mod_base = OTHER; note = 2-Prime-O-Methyl modified nucleoside
  modified_base order(1^2,16^17,28^29): mod_base = OTHER; note = (1,3-dimethylimidazolidin-2-ylidene) Phosphoramidate linkage
  modified_base order(2..16,17..28): mod_base = OTHER; note = Phosphorothioate linkage
  misc_feature 1..29: note = RM115574
ttggcccttcgtctnatggacaaagtctt

SEQ ID NO: 930 - DNA, 29 bp, synthetic construct
  source 1..29: mol_type = other DNA
  misc_feature 11..13: note = DNA
  misc_feature order(1..10,14..29): note = RNA
  modified_base 12: mod_base = OTHER; note = DNA nucleotide carrying a 6-amino-5-nitro-3-yl-2(1H)-pyridone nucleobase
  modified_base order(5,15): mod_base = OTHER; note = 2-Prime-Fluoro modified nucleoside
  modified_base order(1..4,6..10,14,16..29): mod_base = OTHER; note = 2-Prime-O-Methyl modified nucleoside
  modified_base order(1^2,13^14,28^29): mod_base = OTHER; note = (1,3-dimethylimidazolidin-2-ylidene) Phosphoramidate linkage
  modified_base order(2..13,14..28): mod_base = OTHER; note = Phosphorothioate linkage
  misc_feature 1..29: note = RM115575
gcccttcgtctnatggacaaagtctttaa

SEQ ID NO: 931 - DNA, 29 bp, synthetic construct
  source 1..29: mol_type = other DNA
  misc_feature 8..10: note = DNA
  misc_feature order(1..7,11..29): note = RNA
  modified_base 9: mod_base = OTHER; note = DNA nucleotide carrying a 6-amino-5-nitro-3-yl-2(1H)-pyridone nucleobase
  modified_base order(2,12): mod_base = OTHER; note = 2-Prime-Fluoro modified nucleoside
  modified_base order(1,3..7,11,13..29): mod_base = OTHER; note = 2-Prime-O-Methyl modified nucleoside
  modified_base order(1^2,10^11,28^29): mod_base = OTHER; note = (1,3-dimethylimidazolidin-2-ylidene) Phosphoramidate linkage
  modified_base order(2..10,11..28): mod_base = OTHER; note = Phosphorothioate linkage
  misc_feature 1..29: note = RM115576
cttcgtctnatggacaaagtctttaagac

SEQ ID NO: 932 - DNA, 29 bp, synthetic construct
  source 1..29: mol_type = other DNA
  misc_feature 17..19: note = DNA
  misc_feature order(1..16,20..29): note = RNA
  modified_base 18: mod_base = OTHER; note = DNA nucleotide carrying a 6-amino-5-nitro-3-yl-2(1H)-pyridone nucleobase
  modified_base order(4,6,10,13,21..23,27): mod_base = OTHER; note = 2-Prime-Fluoro modified nucleoside
  modified_base order(1..3,5,7..9,11..12,14..16,20,24..26,28..29): mod_base = OTHER; note = 2-Prime-O-Methyl modified nucleoside
  modified_base order(1^2,19^20,28^29): mod_base = OTHER; note = (1,3-dimethylimidazolidin-2-ylidene) Phosphoramidate linkage
  modified_base order(2..19,20..28): mod_base = OTHER; note = Phosphorothioate linkage
  misc_feature 1..29: note = RM115577
aatttggcccttcgtctnatggacaaagt

SEQ ID NO: 933 - DNA, 29 bp, synthetic construct
  source 1..29: mol_type = other DNA
  misc_feature 14..16: note = DNA
  misc_feature order(1..13,17..29): note = RNA
  modified_base 15: mod_base = OTHER; note = DNA nucleotide carrying a 6-amino-5-nitro-3-yl-2(1H)-pyridone nucleobase
  modified_base order(1,3,7,10,18..20,24): mod_base = OTHER; note = 2-Prime-Fluoro modified nucleoside
  modified_base order(2,4..6,8..9,11..13,17,21..23,25..29): mod_base = OTHER; note = 2-Prime-O-Methyl modified nucleoside
  modified_base order(1^2,16^17,28^29): mod_base = OTHER; note = (1,3-dimethylimidazolidin-2-ylidene) Phosphoramidate linkage
  modified_base order(2..16,17..28): mod_base = OTHER; note = Phosphorothioate linkage
  misc_feature 1..29: note = RM115578
ttggcccttcgtctnatggacaaagtctt

SEQ ID NO: 934 - DNA, 29 bp, synthetic construct
  source 1..29: mol_type = other DNA
  misc_feature 11..13: note = DNA
  misc_feature order(1..10,14..29): note = RNA
  modified_base 12: mod_base = OTHER; note = DNA nucleotide carrying a 6-amino-5-nitro-3-yl-2(1H)-pyridone nucleobase
  modified_base order(5,9..10,15,19,22,26,28): mod_base = OTHER; note = 2-Prime-Fluoro modified nucleoside
  modified_base order(1..4,6..8,14,16..18,20..21,23..25,27,29): mod_base = OTHER; note = 2-Prime-O-Methyl modified nucleoside
  modified_base order(1^2,13^14,28^29): mod_base = OTHER; note = (1,3-dimethylimidazolidin-2-ylidene) Phosphoramidate linkage
  modified_base order(2..13,14..28): mod_base = OTHER; note = Phosphorothioate linkage
  misc_feature 1..29: note = RM115579
gcccttcgtctnatggacaaagtctttaa

SEQ ID NO: 935 - DNA, 29 bp, synthetic construct
  source 1..29: mol_type = other DNA
  misc_feature 8..10: note = DNA
  misc_feature order(1..7,11..29): note = RNA
  modified_base 9: mod_base = OTHER; note = DNA nucleotide carrying a 6-amino-5-nitro-3-yl-2(1H)-pyridone nucleobase
  modified_base order(2,6..7,12,16,19,23,25): mod_base = OTHER; note = 2-Prime-Fluoro modified nucleoside
  modified_base order(1,3..5,11,13..15,17..18,20..22,24,26..29): mod_base = OTHER; note = 2-Prime-O-Methyl modified nucleoside
  modified_base order(1^2,10^11,28^29): mod_base = OTHER; note = (1,3-dimethylimidazolidin-2-ylidene) Phosphoramidate linkage
  modified_base order(2..10,11..28): mod_base = OTHER; note = Phosphorothioate linkage
  misc_feature 1..29: note = RM115580
cttcgtctnatggacaaagtctttaagac

SEQ ID NO: 936 - DNA, 26 bp, synthetic construct
  source 1..26: mol_type = other DNA
  misc_feature 18..20: note = DNA
  misc_feature order(1..17,21..26): note = RNA
  modified_base 19: mod_base = OTHER; note = DNA nucleotide carrying a 6-amino-5-nitro-3-yl-2(1H)-pyridone nucleobase
  modified_base order(11,14,22..24): mod_base = OTHER; note = 2-Prime-Fluoro modified nucleoside
  modified_base order(1..10,12..13,15..17,21,25..26): mod_base = OTHER; note = 2-Prime-O-Methyl modified nucleoside
  modified_base order(1^2,20^21,25^26): mod_base = OTHER; note = (1,3-dimethylimidazolidin-2-ylidene) Phosphoramidate linkage
  modified_base order(2..20,21..25): mod_base = OTHER; note = Phosphorothioate linkage
  misc_feature 1..26: note = RM115581
taatttggcccttcgtctnatggaca

SEQ ID NO: 937 - DNA, 26 bp, synthetic construct
  source 1..26: mol_type = other DNA
  misc_feature 15..17: note = DNA
  misc_feature order(1..14,18..26): note = RNA
  modified_base 16: mod_base = OTHER; note = DNA nucleotide carrying a 6-amino-5-nitro-3-yl-2(1H)-pyridone nucleobase
  modified_base order(8,11,19..21): mod_base = OTHER; note = 2-Prime-Fluoro modified nucleoside
  modified_base order(1..7,9..10,12..14,18,22..26): mod_base = OTHER; note = 2-Prime-O-Methyl modified nucleoside
  modified_base order(1^2,17^18,25^26): mod_base = OTHER; note = (1,3-dimethylimidazolidin-2-ylidene) Phosphoramidate linkage
  modified_base order(2..17,18..25): mod_base = OTHER; note = Phosphorothioate linkage
  misc_feature 1..26: note = RM115582
tttggcccttcgtctnatggacaaag

SEQ ID NO: 938 - DNA, 26 bp, synthetic construct
  source 1..26: mol_type = other DNA
  misc_feature 12..14: note = DNA
  misc_feature order(1..11,15..26): note = RNA
  modified_base 13: mod_base = OTHER; note = DNA nucleotide carrying a 6-amino-5-nitro-3-yl-2(1H)-pyridone nucleobase
  modified_base order(5,8,16..18): mod_base = OTHER; note = 2-Prime-Fluoro modified nucleoside
  modified_base order(1..4,6..7,9..11,15,19..26): mod_base = OTHER; note = 2-Prime-O-Methyl modified nucleoside
  modified_base order(1^2,14^15,25^26): mod_base = OTHER; note = (1,3-dimethylimidazolidin-2-ylidene) Phosphoramidate linkage
  modified_base order(2..14,15..25): mod_base = OTHER; note = Phosphorothioate linkage
  misc_feature 1..26: note = RM115583
ggcccttcgtctnatggacaaagtct

SEQ ID NO: 939 - DNA, 26 bp, synthetic construct
  source 1..26: mol_type = other DNA
  misc_feature 9..11: note = DNA
  misc_feature order(1..8,12..26): note = RNA
  modified_base 10: mod_base = OTHER; note = DNA nucleotide carrying a 6-amino-5-nitro-3-yl-2(1H)-pyridone nucleobase
  modified_base order(2,5,13..15): mod_base = OTHER; note = 2-Prime-Fluoro modified nucleoside
  modified_base order(1,3..4,6..8,12,16..26): mod_base = OTHER; note = 2-Prime-O-Methyl modified nucleoside
  modified_base order(1^2,11^12,25^26): mod_base = OTHER; note = (1,3-dimethylimidazolidin-2-ylidene) Phosphoramidate linkage
  modified_base order(2..11,12..25): mod_base = OTHER; note = Phosphorothioate linkage
  misc_feature 1..26: note = RM115584
ccttcgtctnatggacaaagtcttta

SEQ ID NO: 940 - DNA, 29 bp, synthetic construct
  source 1..29: mol_type = other DNA
  misc_feature 23..25: note = DNA
  misc_feature order(1..22,26..29): note = RNA
  modified_base 24: mod_base = OTHER; note = DNA nucleotide carrying a 6-amino-5-nitro-3-yl-2(1H)-pyridone nucleobase
  modified_base order(16,19,27..29): mod_base = OTHER; note = 2-Prime-Fluoro modified nucleoside
  modified_base order(1..15,17..18,20..22,26): mod_base = OTHER; note = 2-Prime-O-Methyl modified nucleoside
  modified_base order(1^2,25^26,28^29): mod_base = OTHER; note = (1,3-dimethylimidazolidin-2-ylidene) Phosphoramidate linkage
  modified_base order(2..25,26..28): mod_base = OTHER; note = Phosphorothioate linkage
  misc_feature 1..29: note = RM115585
gtcattaatttggcccttcgtctnatgga

SEQ ID NO: 941 - DNA, 29 bp, synthetic construct
  source 1..29: mol_type = other DNA
  misc_feature 20..22: note = DNA
  misc_feature order(1..19,23..29): note = RNA
  modified_base 21: mod_base = OTHER; note = DNA nucleotide carrying a 6-amino-5-nitro-3-yl-2(1H)-pyridone nucleobase
  modified_base order(13,16,24..26): mod_base = OTHER; note = 2-Prime-Fluoro modified nucleoside
  modified_base order(1..12,14..15,17..19,23,27..29): mod_base = OTHER; note = 2-Prime-O-Methyl modified nucleoside
  modified_base order(1^2,22^23,28^29): mod_base = OTHER; note = (1,3-dimethylimidazolidin-2-ylidene) Phosphoramidate linkage
  modified_base order(2..22,23..28): mod_base = OTHER; note = Phosphorothioate linkage
  misc_feature 1..29: note = RM115586
attaatttggcccttcgtctnatggacaa

SEQ ID NO: 942 - DNA, 29 bp, synthetic construct
  source 1..29: mol_type = other DNA
  misc_feature 17..19: note = DNA
  misc_feature order(1..16,20..29): note = RNA
  modified_base 18: mod_base = OTHER; note = DNA nucleotide carrying a 6-amino-5-nitro-3-yl-2(1H)-pyridone nucleobase
  modified_base order(10,13,21..23): mod_base = OTHER; note = 2-Prime-Fluoro modified nucleoside
  modified_base order(1..9,11..12,14..16,20,24..29): mod_base = OTHER; note = 2-Prime-O-Methyl modified nucleoside
  modified_base order(1^2,19^20,28^29): mod_base = OTHER; note = (1,3-dimethylimidazolidin-2-ylidene) Phosphoramidate linkage
  modified_base order(2..19,20..28): mod_base = OTHER; note = Phosphorothioate linkage
  misc_feature 1..29: note = RM115587
aatttggcccttcgtctnatggacaaagt

SEQ ID NO: 943 - DNA, 29 bp, synthetic construct
  source 1..29: mol_type = other DNA
  misc_feature 14..16: note = DNA
  misc_feature order(1..13,17..29): note = RNA
  modified_base 15: mod_base = OTHER; note = DNA nucleotide carrying a 6-amino-5-nitro-3-yl-2(1H)-pyridone nucleobase
  modified_base order(7,10,18..20): mod_base = OTHER; note = 2-Prime-Fluoro modified nucleoside
  modified_base order(1..6,8..9,11..13,17,21..29): mod_base = OTHER; note = 2-Prime-O-Methyl modified nucleoside
  modified_base order(1^2,16^17,28^29): mod_base = OTHER; note = (1,3-dimethylimidazolidin-2-ylidene) Phosphoramidate linkage
  modified_base order(2..16,17..28): mod_base = OTHER; note = Phosphorothioate linkage
  misc_feature 1..29: note = RM115588
ttggcccttcgtctnatggacaaagtctt

SEQ ID NO: 944 - DNA, 29 bp, synthetic construct
  source 1..29: mol_type = other DNA
  misc_feature 11..13: note = DNA
  misc_feature order(1..10,14..29): note = RNA
  modified_base 12: mod_base = OTHER; note = DNA nucleotide carrying a 6-amino-5-nitro-3-yl-2(1H)-pyridone nucleobase
  modified_base order(4,7,15..17): mod_base = OTHER; note = 2-Prime-Fluoro modified nucleoside
  modified_base order(1..3,5..6,8..10,14,18..29): mod_base = OTHER; note = 2-Prime-O-Methyl modified nucleoside
  modified_base order(1^2,13^14,28^29): mod_base = OTHER; note = (1,3-dimethylimidazolidin-2-ylidene) Phosphoramidate linkage
  modified_base order(2..13,14..28): mod_base = OTHER; note = Phosphorothioate linkage
  misc_feature 1..29: note = RM115589
gcccttcgtctnatggacaaagtctttaa

SEQ ID NO: 945 - DNA, 29 bp, synthetic construct
  source 1..29: mol_type = other DNA
  misc_feature 8..10: note = DNA
  misc_feature order(1..7,11..29): note = RNA
  modified_base 9: mod_base = OTHER; note = DNA nucleotide carrying a 6-amino-5-nitro-3-yl-2(1H)-pyridone nucleobase
  modified_base order(1,4,12..14): mod_base = OTHER; note = 2-Prime-Fluoro modified nucleoside
  modified_base order(2..3,5..7,11,15..29): mod_base = OTHER; note = 2-Prime-O-Methyl modified nucleoside
  modified_base order(1^2,10^11,28^29): mod_base = OTHER; note = (1,3-dimethylimidazolidin-2-ylidene) Phosphoramidate linkage
  modified_base order(2..10,11..28): mod_base = OTHER; note = Phosphorothioate linkage
  misc_feature 1..29: note = RM115590
cttcgtctnatggacaaagtctttaagac

SEQ ID NO: 946 - DNA, 26 bp, synthetic construct
  source 1..26: mol_type = other DNA
  misc_feature 15..17: note = DNA
  misc_feature order(1..14,18..26): note = RNA
  modified_base 16: mod_base = OTHER; note = DNA nucleotide carrying a 6-amino-5-nitro-3-yl-2(1H)-pyridone nucleobase
  modified_base order(13..14,19,23,26): mod_base = OTHER; note = 2-Prime-Fluoro modified nucleoside
  modified_base order(1..12,18,20..22,24..25): mod_base = OTHER; note = 2-Prime-O-Methyl modified nucleoside
  modified_base order(1^2,17^18,25^26): mod_base = OTHER; note = (1,3-dimethylimidazolidin-2-ylidene) Phosphoramidate linkage
  modified_base order(2..17,18..25): mod_base = OTHER; note = Phosphorothioate linkage
  misc_feature 1..26: note = RM115591
tttggcccttcgtctnatggacaaag

SEQ ID NO: 947 - DNA, 26 bp, synthetic construct
  source 1..26: mol_type = other DNA
  misc_feature 12..14: note = DNA
  misc_feature order(1..11,15..26): note = RNA
  modified_base 13: mod_base = OTHER; note = DNA nucleotide carrying a 6-amino-5-nitro-3-yl-2(1H)-pyridone nucleobase
  modified_base order(10..11,16,20,23): mod_base = OTHER; note = 2-Prime-Fluoro modified nucleoside
  modified_base order(1..9,15,17..19,21..22,24..26): mod_base = OTHER; note = 2-Prime-O-Methyl modified nucleoside
  modified_base order(1^2,14^15,25^26): mod_base = OTHER; note = (1,3-dimethylimidazolidin-2-ylidene) Phosphoramidate linkage
  modified_base order(2..14,15..25): mod_base = OTHER; note = Phosphorothioate linkage
  misc_feature 1..26: note = RM115592
ggcccttcgtctnatggacaaagtct

SEQ ID NO: 948 - DNA, 26 bp, synthetic construct
  source 1..26: mol_type = other DNA
  misc_feature 9..11: note = DNA
  misc_feature order(1..8,12..26): note = RNA
  modified_base 10: mod_base = OTHER; note = DNA nucleotide carrying a 6-amino-5-nitro-3-yl-2(1H)-pyridone nucleobase
  modified_base order(7..8,13,17,20): mod_base = OTHER; note = 2-Prime-Fluoro modified nucleoside
  modified_base order(1..6,12,14..16,18..19,21..26): mod_base = OTHER; note = 2-Prime-O-Methyl modified nucleoside
  modified_base order(1^2,11^12,25^26): mod_base = OTHER; note = (1,3-dimethylimidazolidin-2-ylidene) Phosphoramidate linkage
  modified_base order(2..11,12..25): mod_base = OTHER; note = Phosphorothioate linkage
  misc_feature 1..26: note = RM115593
ccttcgtctnatggacaaagtcttta

SEQ ID NO: 949 - DNA, 26 bp, synthetic construct
  source 1..26: mol_type = other DNA
  misc_feature 6..8: note = DNA
  misc_feature order(1..5,9..26): note = RNA
  modified_base 7: mod_base = OTHER; note = DNA nucleotide carrying a 6-amino-5-nitro-3-yl-2(1H)-pyridone nucleobase
  modified_base order(4..5,10,14,17): mod_base = OTHER; note = 2-Prime-Fluoro modified nucleoside
  modified_base order(1..3,9,11..13,15..16,18..26): mod_base = OTHER; note = 2-Prime-O-Methyl modified nucleoside
  modified_base order(1^2,8^9,25^26): mod_base = OTHER; note = (1,3-dimethylimidazolidin-2-ylidene) Phosphoramidate linkage
  modified_base order(2..8,9..25): mod_base = OTHER; note = Phosphorothioate linkage
  misc_feature 1..26: note = RM115594
tcgtctnatggacaaagtctttaaga

SEQ ID NO: 950 - DNA, 29 bp, synthetic construct
  source 1..29: mol_type = other DNA
  misc_feature 17..19: note = DNA
  misc_feature order(1..16,20..29): note = RNA
  modified_base 18: mod_base = OTHER; note = DNA nucleotide carrying a 6-amino-5-nitro-3-yl-2(1H)-pyridone nucleobase
  modified_base order(15..16,21,25,28): mod_base = OTHER; note = 2-Prime-Fluoro modified nucleoside
  modified_base order(1..14,20,22..24,26..27,29): mod_base = OTHER; note = 2-Prime-O-Methyl modified nucleoside
  modified_base order(1^2,19^20,28^29): mod_base = OTHER; note = (1,3-dimethylimidazolidin-2-ylidene) Phosphoramidate linkage
  modified_base order(2..19,20..28): mod_base = OTHER; note = Phosphorothioate linkage
  misc_feature 1..29: note = RM115595
aatttggcccttcgtctnatggacaaagt

SEQ ID NO: 951 - DNA, 29 bp, synthetic construct
  source 1..29: mol_type = other DNA
  misc_feature 14..16: note = DNA
  misc_feature order(1..13,17..29): note = RNA
  modified_base 15: mod_base = OTHER; note = DNA nucleotide carrying a 6-amino-5-nitro-3-yl-2(1H)-pyridone nucleobase
  modified_base order(12..13,18,22,25): mod_base = OTHER; note = 2-Prime-Fluoro modified nucleoside
  modified_base order(1..11,17,19..21,23..24,26..29): mod_base = OTHER; note = 2-Prime-O-Methyl modified nucleoside
  modified_base order(1^2,16^17,28^29): mod_base = OTHER; note = (1,3-dimethylimidazolidin-2-ylidene) Phosphoramidate linkage
  modified_base order(2..16,17..28): mod_base = OTHER; note = Phosphorothioate linkage
  misc_feature 1..29: note = RM115596
ttggcccttcgtctnatggacaaagtctt

SEQ ID NO: 952 - DNA, 29 bp, synthetic construct
  source 1..29: mol_type = other DNA
  misc_feature 11..13: note = DNA
  misc_feature order(1..10,14..29): note = RNA
  modified_base 12: mod_base = OTHER; note = DNA nucleotide carrying a 6-amino-5-nitro-3-yl-2(1H)-pyridone nucleobase
  modified_base order(9..10,15,19,22): mod_base = OTHER; note = 2-Prime-Fluoro modified nucleoside
  modified_base order(1..8,14,16..18,20..21,23..29): mod_base = OTHER; note = 2-Prime-O-Methyl modified nucleoside
  modified_base order(1^2,13^14,28^29): mod_base = OTHER; note = (1,3-dimethylimidazolidin-2-ylidene) Phosphoramidate linkage
  modified_base order(2..13,14..28): mod_base = OTHER; note = Phosphorothioate linkage
  misc_feature 1..29: note = RM115597
gcccttcgtctnatggacaaagtctttaa

SEQ ID NO: 953 - DNA, 29 bp, synthetic construct
  source 1..29: mol_type = other DNA
  misc_feature 8..10: note = DNA
  misc_feature order(1..7,11..29): note = RNA
  modified_base 9: mod_base = OTHER; note = DNA nucleotide carrying a 6-amino-5-nitro-3-yl-2(1H)-pyridone nucleobase
  modified_base order(6..7,12,16,19): mod_base = OTHER; note = 2-Prime-Fluoro modified nucleoside
  modified_base order(1..5,11,13..15,17..18,20..29): mod_base = OTHER; note = 2-Prime-O-Methyl modified nucleoside
  modified_base order(1^2,10^11,28^29): mod_base = OTHER; note = (1,3-dimethylimidazolidin-2-ylidene) Phosphoramidate linkage
  modified_base order(2..10,11..28): mod_base = OTHER; note = Phosphorothioate linkage
  misc_feature 1..29: note = RM115598
cttcgtctnatggacaaagtctttaagac

SEQ ID NO: 954 - DNA, 29 bp, synthetic construct
  source 1..29: mol_type = other DNA
  misc_feature 5..7: note = DNA
  misc_feature order(1..4,8..29): note = RNA
  modified_base 6: mod_base = OTHER; note = DNA nucleotide carrying a 6-amino-5-nitro-3-yl-2(1H)-pyridone nucleobase
  modified_base order(3..4,9,13,16): mod_base = OTHER; note = 2-Prime-Fluoro modified nucleoside
  modified_base order(1..2,8,10..12,14..15,17..29): mod_base = OTHER; note = 2-Prime-O-Methyl modified nucleoside
  modified_base order(1^2,7^8,28^29): mod_base = OTHER; note = (1,3-dimethylimidazolidin-2-ylidene) Phosphoramidate linkage
  modified_base order(2..7,8..28): mod_base = OTHER; note = Phosphorothioate linkage
  misc_feature 1..29: note = RM115599
cgtctnatggacaaagtctttaagaccat

SEQ ID NO: 955 - DNA, 38 bp, synthetic construct
  source 1..38: mol_type = other DNA
  misc_feature 19..20: note = DNA
  misc_feature order(1..18,21..38): note = RNA
  modified_base 18: mod_base = OTHER; note = 2-Prime-O-Methoxyethyl modified 5-methyl Uridine
  modified_base 19: mod_base = OTHER; note = DNA nucleotide carrying a 6-amino-5-nitro-3-yl-2(1H)-pyridone nucleobase
  modified_base order(13,15,22,24,29..30): mod_base = OTHER; note = 2-Prime-Fluoro modified nucleoside
  modified_base order(1..12,14,16..17,21,23,25..28,31..38): mod_base = OTHER; note = 2-Prime-O-Methyl modified nucleoside
  modified_base order(1^2,37^38): mod_base = OTHER; note = (1,3-dimethylimidazolidin-2-ylidene) Phosphoramidate linkage
  modified_base order(2..20,21..37): mod_base = OTHER; note = Phosphorothioate linkage
  modified_base 20^21: mod_base = OTHER; note = Methylphosphonate linkage
  misc_feature 1..38: note = RM115600
taatttggcccttcgtctnatggacaaagtctttaaga

SEQ ID NO: 956 - DNA, 38 bp, synthetic construct
  source 1..38: mol_type = other DNA
  misc_feature 25..26: note = DNA
  misc_feature order(1..24,27..38): note = RNA
  modified_base 24: mod_base = OTHER; note = 2-Prime-O-Methoxyethyl modified 5-methyl Uridine
  modified_base 25: mod_base = OTHER; note = DNA nucleotide carrying a 6-amino-5-nitro-3-yl-2(1H)-pyridone nucleobase
  modified_base order(16,28,31): mod_base = OTHER; note = 2-Prime-Fluoro modified nucleoside
  modified_base order(1..15,17..23,27,29..30,32..38): mod_base = OTHER; note = 2-Prime-O-Methyl modified nucleoside
  modified_base order(1^2,37^38): mod_base = OTHER; note = (1,3-dimethylimidazolidin-2-ylidene) Phosphoramidate linkage
  modified_base order(2..26,27..37): mod_base = OTHER; note = Phosphorothioate linkage
  modified_base 26^27: mod_base = OTHER; note = Methylphosphonate linkage
  misc_feature 1..38: note = RM115601
tgtcattaatttggcccttcgtctnatggacaaagtct

SEQ ID NO: 957 - DNA, 38 bp, synthetic construct
  source 1..38: mol_type = other DNA
  misc_feature 28..29: note = DNA
  misc_feature order(1..27,30..38): note = RNA
  modified_base 27: mod_base = OTHER; note = 2-Prime-O-Methoxyethyl modified 5-methyl Uridine
  modified_base 28: mod_base = OTHER; note = DNA nucleotide carrying a 6-amino-5-nitro-3-yl-2(1H)-pyridone nucleobase
  modified_base order(22..23,31): mod_base = OTHER; note = 2-Prime-Fluoro modified nucleoside
  modified_base order(1..21,24..26,30,32..38): mod_base = OTHER; note = 2-Prime-O-Methyl modified nucleoside
  modified_base order(1^2,37^38): mod_base = OTHER; note = (1,3-dimethylimidazolidin-2-ylidene) Phosphoramidate linkage
  modified_base order(2..29,30..37): mod_base = OTHER; note = Phosphorothioate linkage
  modified_base 29^30: mod_base = OTHER; note = Methylphosphonate linkage
  misc_feature 1..38: note = RM115602
atatgtcattaatttggcccttcgtctnatggacaaag

SEQ ID NO: 958 - DNA, 38 bp, synthetic construct
  source 1..38: mol_type = other DNA
  misc_feature 16..17: note = DNA
  misc_feature order(1..15,18..38): note = RNA
  modified_base 15: mod_base = OTHER; note = 2-Prime-O-Methoxyethyl modified 5-methyl Uridine
  modified_base 16: mod_base = OTHER; note = DNA nucleotide carrying a 6-amino-5-nitro-3-yl-2(1H)-pyridone nucleobase
  modified_base order(8..10,13,19..20): mod_base = OTHER; note = 2-Prime-Fluoro modified nucleoside
  modified_base order(1..7,11..12,14,18,21..38): mod_base = OTHER; note = 2-Prime-O-Methyl modified nucleoside
  modified_base order(1^2,37^38): mod_base = OTHER; note = (1,3-dimethylimidazolidin-2-ylidene) Phosphoramidate linkage
  modified_base order(2..17,18..37): mod_base = OTHER; note = Phosphorothioate linkage
  modified_base 17^18: mod_base = OTHER; note = Methylphosphonate linkage
  misc_feature 1..38: note = RM115603
tttggcccttcgtctnatggacaaagtctttaagacca

SEQ ID NO: 959 - DNA, 38 bp, synthetic construct
  source 1..38: mol_type = other DNA
  misc_feature 13..14: note = DNA
  misc_feature order(1..12,15..38): note = RNA
  modified_base 12: mod_base = OTHER; note = 2-Prime-O-Methoxyethyl modified 5-methyl Uridine
  modified_base 13: mod_base = OTHER; note = DNA nucleotide carrying a 6-amino-5-nitro-3-yl-2(1H)-pyridone nucleobase
  modified_base order(11,16..17,19,23..24): mod_base = OTHER; note = 2-Prime-Fluoro modified nucleoside
  modified_base order(1..10,15,18,20..22,25..38): mod_base = OTHER; note = 2-Prime-O-Methyl modified nucleoside
  modified_base order(1^2,37^38): mod_base = OTHER; note = (1,3-dimethylimidazolidin-2-ylidene) Phosphoramidate linkage
  modified_base order(2..14,15..37): mod_base = OTHER; note = Phosphorothioate linkage
  modified_base 14^15: mod_base = OTHER; note = Methylphosphonate linkage
  misc_feature 1..38: note = RM115604
ggcccttcgtctnatggacaaagtctttaagaccatgt

SEQ ID NO: 960 - DNA, 38 bp, synthetic construct; identical to SEQ ID NO: 956
  source 1..38: mol_type = other DNA
  misc_feature 25..26: note = DNA
  misc_feature order(1..24,27..38): note = RNA
  modified_base 24: mod_base = OTHER; note = 2-Prime-O-Methoxyethyl modified 5-methyl Uridine
  modified_base 25: mod_base = OTHER; note = DNA nucleotide carrying a 6-amino-5-nitro-3-yl-2(1H)-pyridone nucleobase
  modified_base order(7,9,13,15..16,28,35..37): mod_base = OTHER; note = 2-Prime-Fluoro modified nucleoside
  modified_base order(1..6,8,10..12,14,17..23,27,29..34,38): mod_base = OTHER; note = 2-Prime-O-Methyl modified nucleoside
  modified_base order(1^2,37^38): mod_base = OTHER; note = (1,3-dimethylimidazolidin-2-ylidene) Phosphoramidate linkage
  modified_base order(2..26,27..37): mod_base = OTHER; note = Phosphorothioate linkage
  modified_base 26^27: mod_base = OTHER; note = Methylphosphonate linkage
  misc_feature 1..38: note = RM115605

SEQ ID NO: 961 - DNA, 38 bp, synthetic construct; identical to SEQ ID NO: 957
  source 1..38: mol_type = other DNA
  misc_feature 28..29: note = DNA
  misc_feature order(1..27,30..38): note = RNA
  modified_base 27: mod_base = OTHER; note = 2-Prime-O-Methoxyethyl modified 5-methyl Uridine
  modified_base 28: mod_base = OTHER; note = DNA nucleotide carrying a 6-amino-5-nitro-3-yl-2(1H)-pyridone nucleobase
  modified_base order(24,31..32): mod_base = OTHER; note = 2-Prime-Fluoro modified nucleoside
  modified_base order(1..23,25..26,30,33..38): mod_base = OTHER; note = 2-Prime-O-Methyl modified nucleoside
  modified_base order(1^2,37^38): mod_base = OTHER; note = (1,3-dimethylimidazolidin-2-ylidene) Phosphoramidate linkage
  modified_base order(2..29,30..37): mod_base = OTHER; note = Phosphorothioate linkage
  modified_base 29^30: mod_base = OTHER; note = Methylphosphonate linkage
  misc_feature 1..38: note = RM115606

SEQ ID NO: 962 - DNA, 38 bp, synthetic construct; identical to SEQ ID NO: 956
  source 1..38: mol_type = other DNA
  misc_feature 25..26: note = DNA
  misc_feature order(1..24,27..38): note = RNA
  modified_base 24: mod_base = OTHER; note = 2-Prime-O-Methoxyethyl modified 5-methyl Uridine
  modified_base 25: mod_base = OTHER; note = DNA nucleotide carrying a 6-amino-5-nitro-3-yl-2(1H)-pyridone nucleobase
  modified_base order(13,15..16,28,31,33): mod_base = OTHER; note = 2-Prime-Fluoro modified nucleoside
  modified_base order(1..12,14,17..23,27,29..30,32,34..38): mod_base = OTHER; note = 2-Prime-O-Methyl modified nucleoside
  modified_base order(1^2,37^38): mod_base = OTHER; note = (1,3-dimethylimidazolidin-2-ylidene) Phosphoramidate linkage
  modified_base order(2..26,27..37): mod_base = OTHER; note = Phosphorothioate linkage
  modified_base 26^27: mod_base = OTHER; note = Methylphosphonate linkage
  misc_feature 1..38: note = RM115607

SEQ ID NO: 963 - DNA, 38 bp, synthetic construct
  source 1..38: mol_type = other DNA
  misc_feature 22..23: note = DNA
  misc_feature order(1..21,24..38): note = RNA
  modified_base 21: mod_base = OTHER; note = 2-Prime-O-Methoxyethyl modified 5-methyl Uridine
  modified_base 22: mod_base = OTHER; note = DNA nucleotide carrying a 6-amino-5-nitro-3-yl-2(1H)-pyridone nucleobase
  modified_base order(14..16,19,25..26): mod_base = OTHER; note = 2-Prime-Fluoro modified nucleoside
  modified_base order(1..13,17..18,20,24,27..38): mod_base = OTHER; note = 2-Prime-O-Methyl modified nucleoside
  modified_base order(1^2,37^38): mod_base = OTHER; note = (1,3-dimethylimidazolidin-2-ylidene) Phosphoramidate linkage
  modified_base order(2..23,24..37): mod_base = OTHER; note = Phosphorothioate linkage
  modified_base 23^24: mod_base = OTHER; note = Methylphosphonate linkage
  misc_feature 1..38: note = RM115608
cattaatttggcccttcgtctnatggacaaagtcttta

SEQ ID NO: 964 - DNA, 38 bp, synthetic construct; identical to SEQ ID NO: 955
  source 1..38: mol_type = other DNA
  misc_feature 19..20: note = DNA
  misc_feature order(1..18,21..38): note = RNA
  modified_base 18: mod_base = OTHER; note = 2-Prime-O-Methoxyethyl modified 5-methyl Uridine
  modified_base 19: mod_base = OTHER; note = DNA nucleotide carrying a 6-amino-5-nitro-3-yl-2(1H)-pyridone nucleobase
  modified_base order(14,16,22..23,25,28): mod_base = OTHER; note = 2-Prime-Fluoro modified nucleoside
  modified_base order(1..13,15,17,21,24,26..27,29..38): mod_base = OTHER; note = 2-Prime-O-Methyl modified nucleoside
  modified_base order(1^2,37^38): mod_base = OTHER; note = (1,3-dimethylimidazolidin-2-ylidene) Phosphoramidate linkage
  modified_base order(2..20,21..37): mod_base = OTHER; note = Phosphorothioate linkage
  modified_base 20^21: mod_base = OTHER; note = Methylphosphonate linkage
  misc_feature 1..38: note = RM115609

SEQ ID NO: 965 - DNA, 38 bp, synthetic construct; identical to SEQ ID NO: 956
  source 1..38: mol_type = other DNA
  misc_feature 25..26: note = DNA
  misc_feature order(1..24,27..38): note = RNA
  modified_base 24: mod_base = OTHER; note = 2-Prime-O-Methoxyethyl modified 5-methyl Uridine
  modified_base 25: mod_base = OTHER; note = DNA nucleotide carrying a 6-amino-5-nitro-3-yl-2(1H)-pyridone nucleobase
  modified_base order(20,22..23,28..30): mod_base = OTHER; note = 2-Prime-Fluoro modified nucleoside
  modified_base order(1..19,21,27,31..38): mod_base = OTHER; note = 2-Prime-O-Methyl modified nucleoside
  modified_base order(1^2,37^38): mod_base = OTHER; note = (1,3-dimethylimidazolidin-2-ylidene) Phosphoramidate linkage
  modified_base order(2..26,27..37): mod_base = OTHER; note = Phosphorothioate linkage
  modified_base 26^27: mod_base = OTHER; note = Methylphosphonate linkage
  misc_feature 1..38: note = RM115610

SEQ ID NO: 966 - DNA, 38 bp, synthetic construct; identical to SEQ ID NO: 956
  source 1..38: mol_type = other DNA
  misc_feature 25..26: note = DNA
  misc_feature order(1..24,27..38): note = RNA
  modified_base 24: mod_base = OTHER; note = 2-Prime-O-Methoxyethyl modified 5-methyl Uridine
  modified_base 25: mod_base = OTHER; note = DNA nucleotide carrying a 6-amino-5-nitro-3-yl-2(1H)-pyridone nucleobase
  modified_base order(21,23,28): mod_base = OTHER; note = 2-Prime-Fluoro modified nucleoside
  modified_base order(1..20,22,27,29..38): mod_base = OTHER; note = 2-Prime-O-Methyl modified nucleoside
  modified_base order(1^2,37^38): mod_base = OTHER; note = (1,3-dimethylimidazolidin-2-ylidene) Phosphoramidate linkage
  modified_base order(2..26,27..37): mod_base = OTHER; note = Phosphorothioate linkage
  modified_base 26^27: mod_base = OTHER; note = Methylphosphonate linkage
  misc_feature 1..38: note = RM115611

SEQ ID NO: 967 - DNA, 38 bp, synthetic construct; identical to SEQ ID NO: 959
  source 1..38: mol_type = other DNA
  misc_feature 13..14: note = DNA
  misc_feature order(1..12,15..38): note = RNA
  modified_base 12: mod_base = OTHER; note = 2-Prime-O-Methoxyethyl modified 5-methyl Uridine
  modified_base 13: mod_base = OTHER; note = DNA nucleotide carrying a 6-amino-5-nitro-3-yl-2(1H)-pyridone nucleobase
  modified_base order(5..6,11,16,18..19,21,24,29): mod_base = OTHER; note = 2-Prime-Fluoro modified nucleoside
  modified_base order(1..4,7..10,15,17,20,22..23,25..28,30..38): mod_base = OTHER; note = 2-Prime-O-Methyl modified nucleoside
  modified_base order(1^2,37^38): mod_base = OTHER; note = (1,3-dimethylimidazolidin-2-ylidene) Phosphoramidate linkage
  modified_base order(2..14,15..37): mod_base = OTHER; note = Phosphorothioate linkage
  modified_base 14^15: mod_base = OTHER; note = Methylphosphonate linkage
  misc_feature 1..38: note = RM115612

SEQ ID NO: 968 - DNA, 38 bp, synthetic construct; identical to SEQ ID NO: 959
  source 1..38: mol_type = other DNA
  misc_feature 13..14: note = DNA
  misc_feature order(1..12,15..38): note = RNA
  modified_base 12: mod_base = OTHER; note = 2-Prime-O-Methoxyethyl modified 5-methyl Uridine
  modified_base 13: mod_base = OTHER; note = DNA nucleotide carrying a 6-amino-5-nitro-3-yl-2(1H)-pyridone nucleobase
  modified_base order(9,16,24): mod_base = OTHER; note = 2-Prime-Fluoro modified nucleoside
  modified_base order(1..8,10..11,15,17..23,25..38): mod_base = OTHER; note = 2-Prime-O-Methyl modified nucleoside
  modified_base order(1^2,37^38): mod_base = OTHER; note = (1,3-dimethylimidazolidin-2-ylidene) Phosphoramidate linkage
  modified_base order(2..14,15..37): mod_base = OTHER; note = Phosphorothioate linkage
  modified_base 14^15: mod_base = OTHER; note = Methylphosphonate linkage
  misc_feature 1..38: note = RM115613

SEQ ID NO: 969 - DNA, 38 bp, synthetic construct; identical to SEQ ID NO: 959
  source 1..38: mol_type = other DNA
  misc_feature 13..14: note = DNA
  misc_feature order(1..12,15..38): note = RNA
  modified_base 12: mod_base = OTHER; note = 2-Prime-O-Methoxyethyl modified 5-methyl Uridine
  modified_base 13: mod_base = OTHER; note = DNA nucleotide carrying a 6-amino-5-nitro-3-yl-2(1H)-pyridone nucleobase
  modified_base order(1,6..7,9,16,18): mod_base = OTHER; note = 2-Prime-Fluoro modified nucleoside
  modified_base order(2..5,8,10..11,15,17,19..38): mod_base = OTHER; note = 2-Prime-O-Methyl modified nucleoside
  modified_base order(1^2,37^38): mod_base = OTHER; note = (1,3-dimethylimidazolidin-2-ylidene) Phosphoramidate linkage
  modified_base order(2..14,15..37): mod_base = OTHER; note = Phosphorothioate linkage
  modified_base 14^15: mod_base = OTHER; note = Methylphosphonate linkage
  misc_feature 1..38: note = RM115614

SEQ ID NO: 970 - DNA, 20 bp, synthetic construct
  source 1..20: mol_type = other DNA
  misc_feature 9..10: note = DNA
  misc_feature order(1..8,11..20): note = RNA
  modified_base 8: mod_base = OTHER; note = 2-Prime-O-Methoxyethyl modified 5-methyl Uridine
  modified_base 9: mod_base = OTHER; note = DNA nucleotide carrying a 6-amino-5-nitro-3-yl-2(1H)-pyridone nucleobase
  modified_base order(3..4,12,14): mod_base = OTHER; note = 2-Prime-Fluoro modified nucleoside
  modified_base order(1..2,5..7,11,13,15..20): mod_base = OTHER; note = 2-Prime-O-Methyl modified nucleoside
  modified_base order(1^2,19^20): mod_base = OTHER; note = (1,3-dimethylimidazolidin-2-ylidene) Phosphoramidate linkage
  modified_base order(2..10,11..19): mod_base = OTHER; note = Phosphorothioate linkage
  modified_base 10^11: mod_base = OTHER; note = Methylphosphonate linkage
  misc_feature 1..20: note = RM115615
cttcgtctnatggacaaagt

SEQ ID NO: 971 - DNA, 20 bp, synthetic construct
  source 1..20: mol_type = other DNA
  misc_feature 12..13: note = DNA
  misc_feature order(1..11,14..20): note = RNA
  modified_base 11: mod_base = OTHER; note = 2-Prime-O-Methoxyethyl modified 5-methyl Uridine
  modified_base 12: mod_base = OTHER; note = DNA nucleotide carrying a 6-amino-5-nitro-3-yl-2(1H)-pyridone nucleobase
  modified_base order(5,8,10,15,17,19): mod_base = OTHER; note = 2-Prime-Fluoro modified nucleoside
  modified_base order(1..4,6..7,9,14,16,18,20): mod_base = OTHER; note = 2-Prime-O-Methyl modified nucleoside
  modified_base order(1^2,19^20): mod_base = OTHER; note = (1,3-dimethylimidazolidin-2-ylidene) Phosphoramidate linkage
  modified_base order(2..13,14..19): mod_base = OTHER; note = Phosphorothioate linkage
  modified_base 13^14: mod_base = OTHER; note = Methylphosphonate linkage
  misc_feature 1..20: note = RM115616
gcccttcgtctnatggacaa

SEQ ID NO: 972 - DNA, 20 bp, synthetic construct
  source 1..20: mol_type = other DNA
  misc_feature 6..7: note = DNA
  misc_feature order(1..5,8..20): note = RNA
  modified_base 5: mod_base = OTHER; note = 2-Prime-O-Methoxyethyl modified 5-methyl Uridine
  modified_base 6: mod_base = OTHER; note = DNA nucleotide carrying a 6-amino-5-nitro-3-yl-2(1H)-pyridone nucleobase
  modified_base order(9..10,20): mod_base = OTHER; note = 2-Prime-Fluoro modified nucleoside
  modified_base order(1..4,8,11..19): mod_base = OTHER; note = 2-Prime-O-Methyl modified nucleoside
  modified_base order(1^2,19^20): mod_base = OTHER; note = (1,3-dimethylimidazolidin-2-ylidene) Phosphoramidate linkage
  modified_base order(2..7,8..19): mod_base = OTHER; note = Phosphorothioate linkage
  modified_base 7^8: mod_base = OTHER; note = Methylphosphonate linkage
  misc_feature 1..20: note = RM115617
cgtctnatggacaaagtctt

SEQ ID NO: 973 - DNA, 20 bp, synthetic construct
  source 1..20: mol_type = other DNA
  misc_feature 15..16: note = DNA
  misc_feature order(1..14,17..20): note = RNA
  modified_base 14: mod_base = OTHER; note = 2-Prime-O-Methoxyethyl modified 5-methyl Uridine
  modified_base 15: mod_base = OTHER; note = DNA nucleotide carrying a 6-amino-5-nitro-3-yl-2(1H)-pyridone nucleobase
  modified_base order(1,3,18): mod_base = OTHER; note = 2-Prime-Fluoro modified nucleoside
  modified_base order(2,4..13,17,19..20): mod_base = OTHER; note = 2-Prime-O-Methyl modified nucleoside
  modified_base order(1^2,19^20): mod_base = OTHER; note = (1,3-dimethylimidazolidin-2-ylidene) Phosphoramidate linkage
  modified_base order(2..16,17..19): mod_base = OTHER; note = Phosphorothioate linkage
  modified_base 16^17: mod_base = OTHER; note = Methylphosphonate linkage
  misc_feature 1..20: note = RM115618
ttggcccttcgtctnatgga

SEQ ID NO: 974 - DNA, 20 bp, synthetic construct
  source 1..20: mol_type = other DNA
  misc_feature 9..10: note = DNA
  misc_feature order(1..8,11..20): note = RNA
  modified_base 8: mod_base = OTHER; note = 2-Prime-O-Methoxyethyl modified 5-methyl Uridine
  modified_base 9: mod_base = OTHER; note = DNA nucleotide carrying a 6-amino-5-nitro-3-yl-2(1H)-pyridone nucleobase
  modified_base order(3,12): mod_base = OTHER; note = 2-Prime-Fluoro modified nucleoside
  modified_base order(1..2,4..7,11,13..20): mod_base = OTHER; note = 2-Prime-O-Methyl modified nucleoside
  modified_base order(1^2,19^20): mod_base = OTHER; note = (1,3-dimethylimidazolidin-2-ylidene) Phosphoramidate linkage
  modified_base order(2..10,11..19): mod_base = OTHER; note = Phosphorothioate linkage
  modified_base 10^11: mod_base = OTHER; note = Methylphosphonate linkage
  misc_feature 1..20: note = RM115619
cttcgtctnatggacaaagt

SEQ ID NO: 975 - DNA, 20 bp, synthetic construct
  source 1..20: mol_type = other DNA
  misc_feature 6..7: note = DNA
  misc_feature order(1..5,8..20): note = RNA
  modified_base 5: mod_base = OTHER; note = 2-Prime-O-Methoxyethyl modified 5-methyl Uridine
  modified_base 6: mod_base = OTHER; note = DNA nucleotide carrying a 6-amino-5-nitro-3-yl-2(1H)-pyridone nucleobase
  modified_base order(3..4,9,11,18..19): mod_base = OTHER; note = 2-Prime-Fluoro modified nucleoside
  modified_base order(1..2,8,10,12..17,20): mod_base = OTHER; note = 2-Prime-O-Methyl modified nucleoside
  modified_base order(1^2,19^20): mod_base = OTHER; note = (1,3-dimethylimidazolidin-2-ylidene) Phosphoramidate linkage
  modified_base order(2..7,8..19): mod_base = OTHER; note = Phosphorothioate linkage
  modified_base 7^8: mod_base = OTHER; note = Methylphosphonate linkage
  misc_feature 1..20: note = RM115620
cgtctnatggacaaagtctt

SEQ ID NO: 976 - DNA, 20 bp, synthetic construct
  source 1..20: mol_type = other DNA
  misc_feature 15..16: note = DNA
  misc_feature order(1..14,17..20): note = RNA
  modified_base 14: mod_base = OTHER; note = 2-Prime-O-Methoxyethyl modified 5-methyl Uridine
  modified_base 15: mod_base = OTHER; note = DNA nucleotide carrying a 6-amino-5-nitro-3-yl-2(1H)-pyridone nucleobase
  modified_base order(8,11,18): mod_base = OTHER; note = 2-Prime-Fluoro modified nucleoside
  modified_base order(1..7,9..10,12..13,17,19..20): mod_base = OTHER; note = 2-Prime-O-Methyl modified nucleoside
  modified_base order(1^2,19^20): mod_base = OTHER; note = (1,3-dimethylimidazolidin-2-ylidene) Phosphoramidate linkage
  modified_base order(2..16,17..19): mod_base = OTHER; note = Phosphorothioate linkage
  modified_base 16^17: mod_base = OTHER; note = Methylphosphonate linkage
  misc_feature 1..20: note = RM115621
ttggcccttcgtctnatgga

SEQ ID NO: 977 - DNA, 20 bp, synthetic construct
  source 1..20: mol_type = other DNA
  misc_feature 12..13: note = DNA
  misc_feature order(1..11,14..20): note = RNA
  modified_base 11: mod_base = OTHER; note = 2-Prime-O-Methoxyethyl modified 5-methyl Uridine
  modified_base 12: mod_base = OTHER; note = DNA nucleotide carrying a 6-amino-5-nitro-3-yl-2(1H)-pyridone nucleobase
  modified_base order(1,15): mod_base = OTHER; note = 2-Prime-Fluoro modified nucleoside
  modified_base order(2..10,14,16..20): mod_base = OTHER; note = 2-Prime-O-Methyl modified nucleoside
  modified_base order(1^2,19^20): mod_base = OTHER; note = (1,3-dimethylimidazolidin-2-ylidene) Phosphoramidate linkage
  modified_base order(2..13,14..19): mod_base = OTHER; note = Phosphorothioate linkage
  modified_base 13^14: mod_base = OTHER; note = Methylphosphonate linkage
  misc_feature 1..20: note = RM115622
gcccttcgtctnatggacaa

SEQ ID NO: 978 - DNA, 20 bp, synthetic construct
  source 1..20: mol_type = other DNA
  misc_feature 9..10: note = DNA
  misc_feature order(1..8,11..20): note = RNA
  modified_base 8: mod_base = OTHER; note = 2-Prime-O-Methoxyethyl modified 5-methyl Uridine
  modified_base 9: mod_base = OTHER; note = DNA nucleotide carrying a 6-amino-5-nitro-3-yl-2(1H)-pyridone nucleobase
  modified_base order(3,12..13,17..18): mod_base = OTHER; note = 2-Prime-Fluoro modified nucleoside
  modified_base order(1..2,4..7,11,14..16,19..20): mod_base = OTHER; note = 2-Prime-O-Methyl modified nucleoside
  modified_base order(1^2,19^20): mod_base = OTHER; note = (1,3-dimethylimidazolidin-2-ylidene) Phosphoramidate linkage
  modified_base order(2..10,11..19): mod_base = OTHER; note = Phosphorothioate linkage
  modified_base 10^11: mod_base = OTHER; note = Methylphosphonate linkage
  misc_feature 1..20: note = RM115623
cttcgtctnatggacaaagt

SEQ ID NO: 979 - DNA, 20 bp, synthetic construct
  source 1..20: mol_type = other DNA
  misc_feature 15..16: note = DNA
  misc_feature order(1..14,17..20): note = RNA
  modified_base 14: mod_base = OTHER; note = 2-Prime-O-Methoxyethyl modified 5-methyl Uridine
  modified_base 15: mod_base = OTHER; note = DNA nucleotide carrying a 6-amino-5-nitro-3-yl-2(1H)-pyridone nucleobase
  modified_base order(4..5,9..10,18,20): mod_base = OTHER; note = 2-Prime-Fluoro modified nucleoside
  modified_base order(1..3,6..8,11..13,17,19): mod_base = OTHER; note = 2-Prime-O-Methyl modified nucleoside
  modified_base order(1^2,19^20): mod_base = OTHER; note = (1,3-dimethylimidazolidin-2-ylidene) Phosphoramidate linkage
  modified_base order(2..16,17..19): mod_base = OTHER; note = Phosphorothioate linkage
  modified_base 16^17: mod_base = OTHER; note = Methylphosphonate linkage
  misc_feature 1..20: note = RM115624
ttggcccttcgtctnatgga

SEQ ID NO: 980 - DNA, 20 bp, synthetic construct
  source 1..20: mol_type = other DNA
  misc_feature 15..16: note = DNA
  misc_feature order(1..14,17..20): note = RNA
  modified_base 14: mod_base = OTHER; note = 2-Prime-O-Methoxyethyl modified 5-methyl Uridine
  modified_base 15: mod_base = OTHER; note = DNA nucleotide carrying a 6-amino-5-nitro-3-yl-2(1H)-pyridone nucleobase
  modified_base order(9,11,18,20): mod_base = OTHER; note = 2-Prime-Fluoro modified nucleoside
  modified_base order(1..8,10,12..13,17,19): mod_base = OTHER; note = 2-Prime-O-Methyl modified nucleoside
  modified_base order(1^2,19^20): mod_base = OTHER; note = (1,3-dimethylimidazolidin-2-ylidene) Phosphoramidate linkage
  modified_base order(2..16,17..19): mod_base = OTHER; note = Phosphorothioate linkage
  modified_base 16^17: mod_base = OTHER; note = Methylphosphonate linkage
  misc_feature 1..20: note = RM115625
ttggcccttcgtctnatgga

SEQ ID NO: 981 - DNA, 20 bp, synthetic construct
  source 1..20: mol_type = other DNA
  misc_feature 12..13: note = DNA
  misc_feature order(1..11,14..20): note = RNA
  modified_base 11: mod_base = OTHER; note = 2-Prime-O-Methoxyethyl modified 5-methyl Uridine
  modified_base 12: mod_base = OTHER; note = DNA nucleotide carrying a 6-amino-5-nitro-3-yl-2(1H)-pyridone nucleobase
  modified_base order(10,15..16): mod_base = OTHER; note = 2-Prime-Fluoro modified nucleoside
  modified_base order(1..9,14,17..20): mod_base = OTHER; note = 2-Prime-O-Methyl modified nucleoside
  modified_base order(1^2,19^20): mod_base = OTHER; note = (1,3-dimethylimidazolidin-2-ylidene) Phosphoramidate linkage
  modified_base order(2..13,14..19): mod_base = OTHER; note = Phosphorothioate linkage
  modified_base 13^14: mod_base = OTHER; note = Methylphosphonate linkage
  misc_feature 1..20: note = RM115626
gcccttcgtctnatggacaa

SEQ ID NO: 982 - DNA, 20 bp, synthetic construct
  source 1..20: mol_type = other DNA
  misc_feature 12..13: note = DNA
  misc_feature order(1..11,14..20): note = RNA
  modified_base 11: mod_base = OTHER; note = 2-Prime-O-Methoxyethyl modified 5-methyl Uridine
  modified_base 12: mod_base = OTHER; note = DNA nucleotide carrying a 6-amino-5-nitro-3-yl-2(1H)-pyridone nucleobase
  modified_base order(10,15,17..18,20): mod_base = OTHER; note = 2-Prime-Fluoro modified nucleoside
  modified_base order(1..9,14,16,19): mod_base = OTHER; note = 2-Prime-O-Methyl modified nucleoside
  modified_base order(1^2,19^20): mod_base = OTHER; note = (1,3-dimethylimidazolidin-2-ylidene) Phosphoramidate linkage
  modified_base order(2..13,14..19): mod_base = OTHER; note = Phosphorothioate linkage
  modified_base 13^14: mod_base = OTHER; note = Methylphosphonate linkage
  misc_feature 1..20: note = RM115627
gcccttcgtctnatggacaa

SEQ ID NO: 983 - DNA, 20 bp, synthetic construct
  source 1..20: mol_type = other DNA
  misc_feature 12..13: note = DNA
  misc_feature order(1..11,14..20): note = RNA
  modified_base 11: mod_base = OTHER; note = 2-Prime-O-Methoxyethyl modified 5-methyl Uridine
  modified_base 12: mod_base = OTHER; note = DNA nucleotide carrying a 6-amino-5-nitro-3-yl-2(1H)-pyridone nucleobase
  modified_base order(4..6,9,15..16): mod_base = OTHER; note = 2-Prime-Fluoro modified nucleoside
  modified_base order(1..3,7..8,10,14,17..20): mod_base = OTHER; note = 2-Prime-O-Methyl modified nucleoside
  modified_base order(1^2,19^20): mod_base = OTHER; note = (1,3-dimethylimidazolidin-2-ylidene) Phosphoramidate linkage
  modified_base order(2..13,14..19): mod_base = OTHER; note = Phosphorothioate linkage
  modified_base 13^14: mod_base = OTHER; note = Methylphosphonate linkage
  misc_feature 1..20: note = RM115628
gcccttcgtctnatggacaa

SEQ ID NO: 984 - DNA, 20 bp, synthetic construct
  source 1..20: mol_type = other DNA
  misc_feature 6..7: note = DNA
  misc_feature order(1..5,8..20): note = RNA
  modified_base 5: mod_base = OTHER; note = 2-Prime-O-Methoxyethyl modified 5-methyl Uridine
  modified_base 6: mod_base = OTHER; note = DNA nucleotide carrying a 6-amino-5-nitro-3-yl-2(1H)-pyridone nucleobase
  modified_base order(1,9): mod_base = OTHER; note = 2-Prime-Fluoro modified nucleoside
  modified_base order(2..4,8,10..20): mod_base = OTHER; note = 2-Prime-O-Methyl modified nucleoside
  modified_base order(1^2,19^20): mod_base = OTHER; note = (1,3-dimethylimidazolidin-2-ylidene) Phosphoramidate linkage
  modified_base order(2..7,8..19): mod_base = OTHER; note = Phosphorothioate linkage
  modified_base 7^8: mod_base = OTHER; note = Methylphosphonate linkage
  misc_feature 1..20: note = RM115629
cgtctnatggacaaagtctt

SEQ ID NO: 985 - DNA, 32 bp, synthetic construct; identical to SEQ ID NO: 78
  source 1..32: mol_type = other DNA
  misc_feature 12..14: note = DNA
  misc_feature order(1..11,15..32): note = RNA
  modified_base 13: mod_base = OTHER; note = DNA nucleotide carrying a 6-amino-5-nitro-3-yl-2(1H)-pyridone nucleobase
  modified_base order(9,16..17): mod_base = OTHER; note = 2-Prime-Fluoro modified nucleoside
  modified_base order(1..8,10..11,15,18..32): mod_base = OTHER; note = 2-Prime-O-Methyl modified nucleoside
  modified_base order(1^2,31^32): mod_base = OTHER; note = (1,3-dimethylimidazolidin-2-ylidene) Phosphoramidate linkage
  modified_base order(2..14,15..31): mod_base = OTHER; note = Phosphorothioate linkage
  modified_base 14^15: mod_base = OTHER; note = Methylphosphonate linkage
  misc_feature 1..32: note = RM115630

SEQ ID NO: 986 - DNA, 32 bp, synthetic construct; identical to SEQ ID NO: 79
  source 1..32: mol_type = other DNA
  misc_feature 9..11: note = DNA
  misc_feature order(1..8,12..32): note = RNA
  modified_base 10: mod_base = OTHER; note = DNA nucleotide carrying a 6-amino-5-nitro-3-yl-2(1H)-pyridone nucleobase
  modified_base order(8,13,16): mod_base = OTHER; note = 2-Prime-Fluoro modified nucleoside
  modified_base order(1..7,12,14..15,17..32): mod_base = OTHER; note = 2-Prime-O-Methyl modified nucleoside
  modified_base order(1^2,31^32): mod_base = OTHER; note = (1,3-dimethylimidazolidin-2-ylidene) Phosphoramidate linkage
  modified_base order(2..11,12..31): mod_base = OTHER; note = Phosphorothioate linkage
  modified_base 11^12: mod_base = OTHER; note = Methylphosphonate linkage
  misc_feature 1..32: note = RM115631

SEQ ID NO: 987 - DNA, 32 bp, synthetic construct; identical to SEQ ID NO: 78
  source 1..32: mol_type = other DNA
  misc_feature 12..14: note = DNA
  misc_feature order(1..11,15..32): note = RNA
  modified_base 13: mod_base = OTHER; note = DNA nucleotide carrying a 6-amino-5-nitro-3-yl-2(1H)-pyridone nucleobase
  modified_base order(11,16,19): mod_base = OTHER; note = 2-Prime-Fluoro modified nucleoside
  modified_base order(1..10,15,17..18,20..32): mod_base = OTHER; note = 2-Prime-O-Methyl modified nucleoside
  modified_base order(1^2,31^32): mod_base = OTHER; note = (1,3-dimethylimidazolidin-2-ylidene) Phosphoramidate linkage
  modified_base order(2..14,15..31): mod_base = OTHER; note = Phosphorothioate linkage
  modified_base 14^15: mod_base = OTHER; note = Methylphosphonate linkage
  misc_feature 1..32: note = RM115632

SEQ ID NO: 988 - DNA, 32 bp, synthetic construct; identical to SEQ ID NO: 80
  source 1..32: mol_type = other DNA
  misc_feature 6..8: note = DNA
  misc_feature order(1..5,9..32): note = RNA
  modified_base 7: mod_base = OTHER; note = DNA nucleotide carrying a 6-amino-5-nitro-3-yl-2(1H)-pyridone nucleobase
  modified_base order(3,10..11): mod_base = OTHER; note = 2-Prime-Fluoro modified nucleoside
  modified_base order(1..2,4..5,9,12..32): mod_base = OTHER; note = 2-Prime-O-Methyl modified nucleoside
  modified_base order(1^2,31^32): mod_base = OTHER; note = (1,3-dimethylimidazolidin-2-ylidene) Phosphoramidate linkage
  modified_base order(2..8,9..31): mod_base = OTHER; note = Phosphorothioate linkage
  modified_base 8^9: mod_base = OTHER; note = Methylphosphonate linkage
  misc_feature 1..32: note = RM115633

SEQ ID NO: 989 - DNA, 29 bp, synthetic construct
  source 1..29: mol_type = other DNA
  misc_feature 20..22: note = DNA
  misc_feature order(1..19,23..29): note = RNA
  modified_base 21: mod_base = OTHER; note = DNA nucleotide carrying a 6-amino-5-nitro-3-yl-2(1H)-pyridone nucleobase
  modified_base order(14,24): mod_base = OTHER; note = 2-Prime-Fluoro modified nucleoside
  modified_base order(1..13,15..19,23,25..29): mod_base = OTHER; note = 2-Prime-O-Methyl modified nucleoside
  modified_base order(1^2,28^29): mod_base = OTHER; note = (1,3-dimethylimidazolidin-2-ylidene) Phosphoramidate linkage
  modified_base order(2..22,23..28): mod_base = OTHER; note = Phosphorothioate linkage
  modified_base 22^23: mod_base = OTHER; note = Methylphosphonate linkage
  misc_feature 1..29: note = RM115634
attaatttggcccttcgtctnatggacaa

SEQ ID NO: 990 - DNA, 23 bp, synthetic construct
  source 1..23: mol_type = other DNA
  misc_feature 18..19: note = DNA
  misc_feature order(1..17,20..23): note = RNA
  modified_base 17: mod_base = OTHER; note = 2-Prime-O-Methoxyethyl modified 5-methyl Uridine
  modified_base 18: mod_base = OTHER; note = DNA nucleotide carrying a 6-amino-5-nitro-3-yl-2(1H)-pyridone nucleobase
  modified_base order(12,14,21,23): mod_base = OTHER; note = 2-Prime-Fluoro modified nucleoside
  modified_base order(1..11,13,15..16,20,22): mod_base = OTHER; note = 2-Prime-O-Methyl modified nucleoside
  modified_base order(1^2,22^23): mod_base = OTHER; note = (1,3-dimethylimidazolidin-2-ylidene) Phosphoramidate linkage
  modified_base 17..19: mod_base = OTHER; note = Phosphorothioate linkage
  modified_base 19^20: mod_base = OTHER; note = Methylphosphonate linkage
  misc_feature 1..23: note = RM115635
aatttggcccttcgtctnatgga

SEQ ID NO: 991 - DNA, 26 bp, synthetic construct
  source 1..26: mol_type = other DNA
  misc_feature 16..17: note = DNA
  misc_feature order(1..15,18..26): note = RNA
  modified_base 15: mod_base = OTHER; note = 2-Prime-O-Methoxyethyl modified 5-methyl Uridine
  modified_base 16: mod_base = OTHER; note = DNA nucleotide carrying a 6-amino-5-nitro-3-yl-2(1H)-pyridone nucleobase
  modified_base order(7,19): mod_base = OTHER; note = 2-Prime-Fluoro modified nucleoside
  modified_base order(1..6,8..14,18,20..26): mod_base = OTHER; note = 2-Prime-O-Methyl modified nucleoside
  modified_base order(1^2,25^26): mod_base = OTHER; note = (1,3-dimethylimidazolidin-2-ylidene) Phosphoramidate linkage
  modified_base 15..17: mod_base = OTHER; note = Phosphorothioate linkage
  modified_base 17^18: mod_base = OTHER; note = Methylphosphonate linkage
  misc_feature 1..26: note = RM115636
tttggcccttcgtctnatggacaaag

SEQ ID NO: 992 - DNA, 23 bp, synthetic construct
  source 1..23: mol_type = other DNA
  misc_feature 18..19: note = DNA
  misc_feature order(1..17,20..23): note = RNA
  modified_base 17: mod_base = OTHER; note = 2-Prime-O-Methoxyethyl modified 5-methyl Uridine
  modified_base 18: mod_base = OTHER; note = DNA nucleotide carrying a 6-amino-5-nitro-3-yl-2(1H)-pyridone nucleobase
  modified_base order(4,10,21,23): mod_base = OTHER; note = 2-Prime-Fluoro modified nucleoside
  modified_base order(1..3,5..9,11..16,20,22): mod_base = OTHER; note = 2-Prime-O-Methyl modified nucleoside
  modified_base order(1^2,22^23): mod_base = OTHER; note = (1,3-dimethylimidazolidin-2-ylidene) Phosphoramidate linkage
  modified_base 17..19: mod_base = OTHER; note = Phosphorothioate linkage
  modified_base 19^20: mod_base = OTHER; note = Methylphosphonate linkage
  misc_feature 1..23: note = RM115637
aatttggcccttcgtctnatgga

SEQ ID NO: 993 - DNA, 32 bp, synthetic construct; identical to SEQ ID NO: 78
  source 1..32: mol_type = other DNA
  misc_feature 13..14: note = DNA
  misc_feature order(1..12,15..32): note = RNA
  modified_base 12: mod_base = OTHER; note = 2-Prime-O-Methoxyethyl modified 5-methyl Uridine
  modified_base 13: mod_base = OTHER; note = DNA nucleotide carrying a 6-amino-5-nitro-3-yl-2(1H)-pyridone nucleobase
  modified_base order(3..4,7,16..17,21..22,25,28): mod_base = OTHER; note = 2-Prime-Fluoro modified nucleoside
  modified_base order(1..2,5..6,8..11,15,18..20,23..24,26..27,29..32): mod_base = OTHER; note = 2-Prime-O-Methyl modified nucleoside
  modified_base order(1^2,31^32): mod_base = OTHER; note = (1,3-dimethylimidazolidin-2-ylidene) Phosphoramidate linkage
  modified_base 12..14: mod_base = OTHER; note = Phosphorothioate linkage
  modified_base 14^15: mod_base = OTHER; note = Methylphosphonate linkage
  misc_feature 1..32: note = RM115638

SEQ ID NO: 994 - DNA, 32 bp, synthetic construct; identical to SEQ ID NO: 78
  source 1..32: mol_type = other DNA
  misc_feature 13..14: note = DNA
  misc_feature order(1..12,15..32): note = RNA
  modified_base 12: mod_base = OTHER; note = 2-Prime-O-Methoxyethyl modified 5-methyl Uridine
  modified_base 13: mod_base = OTHER; note = DNA nucleotide carrying a 6-amino-5-nitro-3-yl-2(1H)-pyridone nucleobase
  modified_base order(1,6..7,9,16,18): mod_base = OTHER; note = 2-Prime-Fluoro modified nucleoside
  modified_base order(2..5,8,10..11,15,17,19..32): mod_base = OTHER; note = 2-Prime-O-Methyl modified nucleoside
  modified_base order(1^2,31^32): mod_base = OTHER; note = (1,3-dimethylimidazolidin-2-ylidene) Phosphoramidate linkage
  modified_base 12..14: mod_base = OTHER; note = Phosphorothioate linkage
  modified_base 14^15: mod_base = OTHER; note = Methylphosphonate linkage
  misc_feature 1..32: note = RM115639

SEQ ID NO: 995 - DNA, 26 bp, synthetic construct
  source 1..26: mol_type = other DNA
  misc_feature 16..17: note = DNA
  misc_feature order(1..15,18..26): note = RNA
  modified_base 15: mod_base = OTHER; note = 2-Prime-O-Methoxyethyl modified 5-methyl Uridine
  modified_base 16: mod_base = OTHER; note = DNA nucleotide carrying a 6-amino-5-nitro-3-yl-2(1H)-pyridone nucleobase
  modified_base order(2..3,6..7,19): mod_base = OTHER; note = 2-Prime-Fluoro modified nucleoside
  modified_base order(1,4..5,8..14,18,20..26): mod_base = OTHER; note = 2-Prime-O-Methyl modified nucleoside
  modified_base order(1^2,25^26): mod_base = OTHER; note = (1,3-dimethylimidazolidin-2-ylidene) Phosphoramidate linkage
  modified_base 15..17: mod_base = OTHER; note = Phosphorothioate linkage
  modified_base 17^18: mod_base = OTHER; note = Methylphosphonate linkage
  misc_feature 1..26: note = RM115640
tttggcccttcgtctnatggacaaag

SEQ ID NO: 996 - DNA, 26 bp, synthetic construct
  source 1..26: mol_type = other DNA
  misc_feature 16..17: note = DNA
  misc_feature order(1..15,18..26): note = RNA
  modified_base 15: mod_base = OTHER; note = 2-Prime-O-Methoxyethyl modified 5-methyl Uridine
  modified_base 16: mod_base = OTHER; note = DNA nucleotide carrying a 6-amino-5-nitro-3-yl-2(1H)-pyridone nucleobase
  modified_base order(1..2,12,19..20,24..25): mod_base = OTHER; note = 2-Prime-Fluoro modified nucleoside
  modified_base order(3..11,13..14,18,21..23,26): mod_base = OTHER; note = 2-Prime-O-Methyl modified nucleoside
  modified_base order(1^2,25^26): mod_base = OTHER; note = (1,3-dimethylimidazolidin-2-ylidene) Phosphoramidate linkage
  modified_base 15..17: mod_base = OTHER; note = Phosphorothioate linkage
  modified_base 17^18: mod_base = OTHER; note = Methylphosphonate linkage
  misc_feature 1..26: note = RM115641
tttggcccttcgtctnatggacaaag

SEQ ID NO: 997 - DNA, 23 bp, synthetic construct
  source 1..23: mol_type = other DNA
  misc_feature 18..19: note = DNA
  misc_feature order(1..17,20..23): note = RNA
  modified_base 17: mod_base = OTHER; note = 2-Prime-O-Methoxyethyl modified 5-methyl Uridine
  modified_base 18: mod_base = OTHER; note = DNA nucleotide carrying a 6-amino-5-nitro-3-yl-2(1H)-pyridone nucleobase
  modified_base order(9,12,14..15,21..22): mod_base = OTHER; note = 2-Prime-Fluoro modified nucleoside
  modified_base order(1..8,10..11,13,16,20,23): mod_base = OTHER; note = 2-Prime-O-Methyl modified nucleoside
  modified_base order(1^2,22^23): mod_base = OTHER; note = (1,3-dimethylimidazolidin-2-ylidene) Phosphoramidate linkage
  modified_base 17..19: mod_base = OTHER; note = Phosphorothioate linkage
  modified_base 19^20: mod_base = OTHER; note = Methylphosphonate linkage
  misc_feature 1..23: note = RM115642
aatttggcccttcgtctnatgga

SEQ ID NO: 998 - DNA, 23 bp, synthetic construct
  source 1..23: mol_type = other DNA
  misc_feature 12..13: note = DNA
  misc_feature order(1..11,14..23): note = RNA
  modified_base 11: mod_base = OTHER; note = 2-Prime-O-Methoxyethyl modified 5-methyl Uridine
  modified_base 12: mod_base = OTHER; note = DNA nucleotide carrying a 6-amino-5-nitro-3-yl-2(1H)-pyridone nucleobase
  modified_base order(6,8,15,17): mod_base = OTHER; note = 2-Prime-Fluoro modified nucleoside
  modified_base order(1..5,7,9..10,14,16,18..23): mod_base = OTHER; note = 2-Prime-O-Methyl modified nucleoside
  modified_base order(1^2,22^23): mod_base = OTHER; note = (1,3-dimethylimidazolidin-2-ylidene) Phosphoramidate linkage
  modified_base 11..13: mod_base = OTHER; note = Phosphorothioate linkage
  modified_base 13^14: mod_base = OTHER; note = Methylphosphonate linkage
  misc_feature 1..23: note = RM115643
gcccttcgtctnatggacaaagt

SEQ ID NO: 999 - DNA, 29 bp, synthetic construct
  source 1..29: mol_type = other DNA
  misc_feature 9..10: note = DNA
  misc_feature order(1..8,11..29): note = RNA
  modified_base 8: mod_base = OTHER; note = 2-Prime-O-Methoxyethyl modified 5-methyl Uridine
  modified_base 9: mod_base = OTHER; note = DNA nucleotide carrying a 6-amino-5-nitro-3-yl-2(1H)-pyridone nucleobase
  modified_base order(2,12): mod_base = OTHER; note = 2-Prime-Fluoro modified nucleoside
  modified_base order(1,3..7,11,13..29): mod_base = OTHER; note = 2-Prime-O-Methyl modified nucleoside
  modified_base order(1^2,28^29): mod_base = OTHER; note = (1,3-dimethylimidazolidin-2-ylidene) Phosphoramidate linkage
  modified_base 8..10: mod_base = OTHER; note = Phosphorothioate linkage
  modified_base 10^11: mod_base = OTHER; note = Methylphosphonate linkage
  misc_feature 1..29: note = RM115644
cttcgtctnatggacaaagtctttaagac

SEQ ID NO: 1000 - DNA, 32 bp, synthetic construct; identical to SEQ ID NO: 78
  source 1..32: mol_type = other DNA
  misc_feature 13..14: note = DNA
  misc_feature order(1..12,15..32): note = RNA
  modified_base 12: mod_base = OTHER; note = 2-Prime-O-Methoxyethyl modified 5-methyl Uridine
  modified_base 13: mod_base = OTHER; note = DNA nucleotide carrying a 6-amino-5-nitro-3-yl-2(1H)-pyridone nucleobase
  modified_base order(3..4,7,16..17,21..22,25,28): mod_base = OTHER; note = 2-Prime-Fluoro modified nucleoside
  modified_base order(1..2,5..6,8..11,15,18..20,23..24,26..27,29..32): mod_base = OTHER; note = 2-Prime-O-Methyl modified nucleoside
  modified_base order(1^2,31^32): mod_base = OTHER; note = (1,3-dimethylimidazolidin-2-ylidene) Phosphoramidate linkage
  modified_base order(3..5,7^8,12..14,16..18,21..23,25^26,28^29): mod_base = OTHER; note = Phosphorothioate linkage
  modified_base 14^15: mod_base = OTHER; note = Methylphosphonate linkage
  misc_feature 1..32: note = RM115645

SEQ ID NO: 1001 - DNA, 23 bp, synthetic construct
  source 1..23: mol_type = other DNA
  misc_feature 18..19: note = DNA
  misc_feature order(1..17,20..23): note = RNA
  modified_base 17: mod_base = OTHER; note = 2-Prime-O-Methoxyethyl modified 5-methyl Uridine
  modified_base 18: mod_base = OTHER; note = DNA nucleotide carrying a 6-amino-5-nitro-3-yl-2(1H)-pyridone nucleobase
  modified_base order(12,14,21,23): mod_base = OTHER; note = 2-Prime-Fluoro modified nucleoside
  modified_base order(1..11,13,15..16,20,22): mod_base = OTHER; note = 2-Prime-O-Methyl modified nucleoside
  modified_base order(1^2,22^23): mod_base = OTHER; note = (1,3-dimethylimidazolidin-2-ylidene) Phosphoramidate linkage
  modified_base order(12^13,14^15,17..19,21^22): mod_base = OTHER; note = Phosphorothioate linkage
  modified_base 19^20: mod_base = OTHER; note = Methylphosphonate linkage
  misc_feature 1..23: note = RM115646
aatttggcccttcgtctnatgga

SEQ ID NO: 1002 - DNA, 23 bp, synthetic construct
  source 1..23: mol_type = other DNA
  misc_feature 12..13: note = DNA
  misc_feature order(1..11,14..23): note = RNA
  modified_base 11: mod_base = OTHER; note = 2-Prime-O-Methoxyethyl modified 5-methyl Uridine
  modified_base 12: mod_base = OTHER; note = DNA nucleotide carrying a 6-amino-5-nitro-3-yl-2(1H)-pyridone nucleobase
  modified_base order(6,8,15,17): mod_base = OTHER; note = 2-Prime-Fluoro modified nucleoside
  modified_base order(1..5,7,9..10,14,16,18..23): mod_base = OTHER; note = 2-Prime-O-Methyl modified nucleoside
  modified_base order(1^2,22^23): mod_base = OTHER; note = (1,3-dimethylimidazolidin-2-ylidene) Phosphoramidate linkage
  modified_base order(6^7,8^9,11..13,15^16,17^18): mod_base = OTHER; note = Phosphorothioate linkage
  modified_base 13^14: mod_base = OTHER; note = Methylphosphonate linkage
  misc_feature 1..23: note = RM115647
gcccttcgtctnatggacaaagt

SEQ ID NO: 1003 - DNA, 26 bp, synthetic construct
  source 1..26: mol_type = other DNA
  misc_feature 16..17: note = DNA
  misc_feature order(1..15,18..26): note = RNA
  modified_base 15: mod_base = OTHER; note = 2-Prime-O-Methoxyethyl modified 5-methyl Uridine
  modified_base 16: mod_base = OTHER; note = DNA nucleotide carrying a 6-amino-5-nitro-3-yl-2(1H)-pyridone nucleobase
  modified_base order(7,19): mod_base = OTHER; note = 2-Prime-Fluoro modified nucleoside
  modified_base order(1..6,8..14,18,20..26): mod_base = OTHER; note = 2-Prime-O-Methyl modified nucleoside
  modified_base order(1^2,25^26): mod_base = OTHER; note = (1,3-dimethylimidazolidin-2-ylidene) Phosphoramidate linkage
  modified_base order(7^8,15..17,19^20): mod_base = OTHER; note = Phosphorothioate linkage
  modified_base 17^18: mod_base = OTHER; note = Methylphosphonate linkage
  misc_feature 1..26: note = RM115648
tttggcccttcgtctnatggacaaag

SEQ ID NO: 1004 - DNA, 32 bp, synthetic construct; identical to SEQ ID NO: 78
  source 1..32: mol_type = other DNA
  misc_feature 13..14: note = DNA
  misc_feature order(1..12,15..32): note = RNA
  modified_base 12: mod_base = OTHER; note = 2-Prime-O-Methoxyethyl modified 5-methyl Uridine
  modified_base 13: mod_base = OTHER; note = DNA nucleotide carrying a 6-amino-5-nitro-3-yl-2(1H)-pyridone nucleobase
  modified_base order(1,6..7,9,16,18): mod_base = OTHER; note = 2-Prime-Fluoro modified nucleoside
  modified_base order(2..5,8,10..11,15,17,19..32): mod_base = OTHER; note = 2-Prime-O-Methyl modified nucleoside
  modified_base order(1^2,31^32): mod_base = OTHER; note = (1,3-dimethylimidazolidin-2-ylidene) Phosphoramidate linkage
  modified_base order(6..8,9^10,12..14,16^17,18^19): mod_base = OTHER; note = Phosphorothioate linkage
  modified_base 14^15: mod_base = OTHER; note = Methylphosphonate linkage
  misc_feature 1..32: note = RM115649

SEQ ID NO: 1005 - DNA, 32 bp, synthetic construct; identical to SEQ ID NO: 78
  source 1..32: mol_type = other DNA
  misc_feature 13..14: note = DNA
  misc_feature order(1..12,15..32): note = RNA
  modified_base 12: mod_base = OTHER; note = 2-Prime-O-Methoxyethyl modified 5-methyl Uridine
  modified_base 13: mod_base = OTHER; note = DNA nucleotide carrying a 6-amino-5-nitro-3-yl-2(1H)-pyridone nucleobase
  modified_base order(3..4,7,16..17,21..22,25,28): mod_base = OTHER; note = 2-Prime-Fluoro modified nucleoside
  modified_base order(1..2,5..6,8..11,15,18..20,23..24,26..27,29..32): mod_base = OTHER; note = 2-Prime-O-Methyl modified nucleoside
  modified_base order(1^2,31^32): mod_base = OTHER; note = (1,3-dimethylimidazolidin-2-ylidene) Phosphoramidate linkage
  modified_base order(3^4,5^6,7^8,9^10,11..14,15^16,17^18,19^20,21^22,23^24,25^26,27^28,29^30): mod_base = OTHER; note = Phosphorothioate linkage
  modified_base 14^15: mod_base = OTHER; note = Methylphosphonate linkage
  misc_feature 1..32: note = RM115650

SEQ ID NO: 1006 - DNA, 23 bp, synthetic construct
  source 1..23: mol_type = other DNA
  misc_feature 18..19: note = DNA
  misc_feature order(1..17,20..23): note = RNA
  modified_base 17: mod_base = OTHER; note = 2-Prime-O-Methoxyethyl modified 5-methyl Uridine
  modified_base 18: mod_base = OTHER; note = DNA nucleotide carrying a 6-amino-5-nitro-3-yl-2(1H)-pyridone nucleobase
  modified_base order(12,14,21,23): mod_base = OTHER; note = 2-Prime-Fluoro modified nucleoside
  modified_base order(1..11,13,15..16,20,22): mod_base = OTHER; note = 2-Prime-O-Methyl modified nucleoside
  modified_base order(1^2,22^23): mod_base = OTHER; note = (1,3-dimethylimidazolidin-2-ylidene) Phosphoramidate linkage
  modified_base order(3^4,5^6,7^8,9^10,11^12,13^14,15^16,17..19,21^22): mod_base = OTHER; note = Phosphorothioate linkage
  modified_base 19^20: mod_base = OTHER; note = Methylphosphonate linkage
  misc_feature 1..23: note = RM115651
aatttggcccttcgtctnatgga

SEQ ID NO: 1007 - DNA, 23 bp, synthetic construct
  source 1..23: mol_type = other DNA
  misc_feature 12..13: note = DNA
  misc_feature order(1..11,14..23): note = RNA
  modified_base 11: mod_base = OTHER; note = 2-Prime-O-Methoxyethyl modified 5-methyl Uridine
  modified_base 12: mod_base = OTHER; note = DNA nucleotide carrying a 6-amino-5-nitro-3-yl-2(1H)-pyridone nucleobase
  modified_base order(6,8,15,17): mod_base = OTHER; note = 2-Prime-Fluoro modified nucleoside
  modified_base order(1..5,7,9..10,14,16,18..23): mod_base = OTHER; note = 2-Prime-O-Methyl modified nucleoside
  modified_base order(1^2,22^23): mod_base = OTHER; note = (1,3-dimethylimidazolidin-2-ylidene) Phosphoramidate linkage
  modified_base order(3^4,5^6,7^8,9^10,11..13,15^16,17^18,19^20,21^22): mod_base = OTHER; note = Phosphorothioate linkage
  modified_base 13^14: mod_base = OTHER; note = Methylphosphonate linkage
  misc_feature 1..23: note = RM115652
gcccttcgtctnatggacaaagt

SEQ ID NO: 1008 - DNA, 26 bp, synthetic construct
  source 1..26: mol_type = other DNA
  misc_feature 16..17: note = DNA
  misc_feature order(1..15,18..26): note = RNA
  modified_base 15: mod_base = OTHER; note = 2-Prime-O-Methoxyethyl modified 5-methyl Uridine
  modified_base 16: mod_base = OTHER; note = DNA nucleotide carrying a 6-amino-5-nitro-3-yl-2(1H)-pyridone nucleobase
  modified_base order(7,19): mod_base = OTHER; note = 2-Prime-Fluoro modified nucleoside
  modified_base order(1..6,8..14,18,20..26): mod_base = OTHER; note = 2-Prime-O-Methyl modified nucleoside
  modified_base order(1^2,25^26): mod_base = OTHER; note = (1,3-dimethylimidazolidin-2-ylidene) Phosphoramidate linkage
  modified_base order(3^4,5^6,7^8,9^10,11^12,13^14,15..17,19^20,21^22,23^24): mod_base = OTHER; note = Phosphorothioate linkage
  modified_base 17^18: mod_base = OTHER; note = Methylphosphonate linkage
  misc_feature 1..26: note = RM115653
tttggcccttcgtctnatggacaaag

SEQ ID NO: 1009 - DNA, 32 bp, synthetic construct; identical to SEQ ID NO: 78
  source 1..32: mol_type = other DNA
  misc_feature 13..14: note = DNA
  misc_feature order(1..12,15..32): note = RNA
  modified_base 12: mod_base = OTHER; note = 2-Prime-O-Methoxyethyl modified 5-methyl Uridine
  modified_base 13: mod_base = OTHER; note = DNA nucleotide carrying a 6-amino-5-nitro-3-yl-2(1H)-pyridone nucleobase
  modified_base order(1,6..7,9,16,18): mod_base = OTHER; note = 2-Prime-Fluoro modified nucleoside
  modified_base order(2..5,8,10..11,15,17,19..32): mod_base = OTHER; note = 2-Prime-O-Methyl modified nucleoside
  modified_base order(1^2,31^32): mod_base = OTHER; note = (1,3-dimethylimidazolidin-2-ylidene) Phosphoramidate linkage
  modified_base order(3^4,5^6,7^8,9^10,11..14,15^16,17^18,19^20,21^22,23^24,25^26,27^28,29^30): mod_base = OTHER; note = Phosphorothioate linkage
  modified_base 14^15: mod_base = OTHER; note = Methylphosphonate linkage
  misc_feature 1..32: note = RM115654

SEQ ID NO: 1010 - DNA, 30 bp, synthetic construct
  source 1..30: mol_type = other DNA
  misc_feature 24..25: note = DNA
  misc_feature order(1..23,26..30): note = RNA
  modified_base 28: mod_base = OTHER; note = 2-Prime-O-Methoxyethyl modified nucleoside
  modified_base 23: mod_base = OTHER; note = 2-Prime-O-Methoxyethyl modified 5-methyl Uridine
  modified_base 24: mod_base = OTHER; note = DNA nucleotide carrying a 6-amino-5-nitro-3-yl-2(1H)-pyridone nucleobase
  modified_base order(5..6,9..10,13..14,17..22,27): mod_base = OTHER; note = 2-Prime-Fluoro modified nucleoside
  modified_base order(1..4,7..8,11..12,15..16,26,29..30): mod_base = OTHER; note = 2-Prime-O-Methyl modified nucleoside
  modified_base order(1^2,29^30): mod_base = OTHER; note = (1,3-dimethylimidazolidin-2-ylidene) Phosphoramidate linkage
  modified_base order(2..23,24^25,27..29): mod_base = OTHER; note = Phosphorothioate linkage
  modified_base 25^26: mod_base = OTHER; note = Methylphosphonate linkage
  misc_feature 1..30: note = RM107905
gtcattaatttggcccttcctctnatggac

SEQ ID NO: 1011 - DNA, 31 bp, synthetic construct
  source 1..31: mol_type = other DNA
  misc_feature 25..26: note = DNA
  misc_feature order(1..24,27..31): note = RNA
  modified_base 29: mod_base = OTHER; note = 2-Prime-O-Methoxyethyl modified nucleoside
  modified_base 24: mod_base = OTHER; note = 2-Prime-O-Methoxyethyl modified 5-methyl Uridine
  modified_base 25: mod_base = OTHER; note = DNA nucleotide carrying a 6-amino-5-nitro-3-yl-2(1H)-pyridone nucleobase
  modified_base order(6..7,10..11,14..15,18..23,28): mod_base = OTHER; note = 2-Prime-Fluoro modified nucleoside
  modified_base order(1..5,8..9,12..13,16..17,27,30..31): mod_base = OTHER; note = 2-Prime-O-Methyl modified nucleoside
  modified_base order(1^2,30^31): mod_base = OTHER; note = (1,3-dimethylimidazolidin-2-ylidene) Phosphoramidate linkage
  modified_base order(2..24,25^26,28..30): mod_base = OTHER; note = Phosphorothioate linkage
  modified_base 26^27: mod_base = OTHER; note = Methylphosphonate linkage
  misc_feature 1..31: note = RM115655
tgtcattaatttggcccttcctctnatggac

SEQ ID NO: 1012 - DNA, 30 bp, synthetic construct
  source 1..30: mol_type = other DNA
  misc_feature 25..26: note = DNA
  misc_feature order(1..24,27..30): note = RNA
  modified_base 29: mod_base = OTHER; note = 2-Prime-O-Methoxyethyl modified nucleoside
  modified_base 24: mod_base = OTHER; note = 2-Prime-O-Methoxyethyl modified 5-methyl Uridine
  modified_base 25: mod_base = OTHER; note = DNA nucleotide carrying a 6-amino-5-nitro-3-yl-2(1H)-pyridone nucleobase
  modified_base order(6..7,10..11,14..15,18..23,28): mod_base = OTHER; note = 2-Prime-Fluoro modified nucleoside
  modified_base order(1..5,8..9,12..13,16..17,27,30): mod_base = OTHER; note = 2-Prime-O-Methyl modified nucleoside
  modified_base order(1^2,29^30): mod_base = OTHER; note = (1,3-dimethylimidazolidin-2-ylidene) Phosphoramidate linkage
  modified_base order(2..24,25^26,28^29): mod_base = OTHER; note = Phosphorothioate linkage
  modified_base 26^27: mod_base = OTHER; note = Methylphosphonate linkage
  misc_feature 1..30: note = RM115656
tgtcattaatttggcccttcctctnatgga

SEQ ID NO: 1013 - DNA, 31 bp, synthetic construct
  source 1..31: mol_type = other DNA
  misc_feature 24..25: note = DNA
  misc_feature order(1..23,26..31): note = RNA
  modified_base 28: mod_base = OTHER; note = 2-Prime-O-Methoxyethyl modified nucleoside
  modified_base 23: mod_base = OTHER; note = 2-Prime-O-Methoxyethyl modified 5-methyl Uridine
  modified_base 24: mod_base = OTHER; note = DNA nucleotide carrying a 6-amino-5-nitro-3-yl-2(1H)-pyridone nucleobase
  modified_base order(5..6,9..10,13..14,17..22,27): mod_base = OTHER; note = 2-Prime-Fluoro modified nucleoside
  modified_base order(1..4,7..8,11..12,15..16,26,29..31): mod_base = OTHER; note = 2-Prime-O-Methyl modified nucleoside
  modified_base order(1^2,30^31): mod_base = OTHER; note = (1,3-dimethylimidazolidin-2-ylidene) Phosphoramidate linkage
  modified_base order(2..23,24^25,27..30): mod_base = OTHER; note = Phosphorothioate linkage
  modified_base 25^26: mod_base = OTHER; note = Methylphosphonate linkage
  misc_feature 1..31: note = RM115657
gtcattaatttggcccttcctctnatggaca

SEQ ID NO: 1014 - DNA, 30 bp, synthetic construct
  source 1..30: mol_type = other DNA
  misc_feature 23..24: note = DNA
  misc_feature order(1..22,25..30): note = RNA
  modified_base 27: mod_base = OTHER; note = 2-Prime-O-Methoxyethyl modified nucleoside
  modified_base 22: mod_base = OTHER; note = 2-Prime-O-Methoxyethyl modified 5-methyl Uridine
  modified_base 23: mod_base = OTHER; note = DNA nucleotide carrying a 6-amino-5-nitro-3-yl-2(1H)-pyridone nucleobase
  modified_base order(4..5,8..9,12..13,16..21,26): mod_base = OTHER; note = 2-Prime-Fluoro modified nucleoside
  modified_base order(1..3,6..7,10..11,14..15,25,28..30): mod_base = OTHER; note = 2-Prime-O-Methyl modified nucleoside
  modified_base order(1^2,29^30): mod_base = OTHER; note = (1,3-dimethylimidazolidin-2-ylidene) Phosphoramidate linkage
  modified_base order(2..22,23^24,26..29): mod_base = OTHER; note = Phosphorothioate linkage
  modified_base 24^25: mod_base = OTHER; note = Methylphosphonate linkage
  misc_feature 1..30: note = RM115658
tcattaatttggcccttcctctnatggaca

SEQ ID NO: 1015 - DNA, 30 bp, synthetic construct; identical to SEQ ID NO: 25
  source 1..30: mol_type = other DNA
  misc_feature 24..25: note = DNA
  misc_feature order(1..23,26..30): note = RNA
  modified_base order(1,28): mod_base = OTHER; note = 2-Prime-O-Methoxyethyl modified nucleoside
  modified_base 23: mod_base = OTHER; note = 2-Prime-O-Methoxyethyl modified 5-methyl Uridine
  modified_base 24: mod_base = OTHER; note = DNA nucleotide carrying a 6-amino-5-nitro-3-yl-2(1H)-pyridone nucleobase
  modified_base order(5..6,9..10,13..14,17..22,27): mod_base = OTHER; note = 2-Prime-Fluoro modified nucleoside
  modified_base order(2..4,7..8,11..12,15..16,26,29..30): mod_base = OTHER; note = 2-Prime-O-Methyl modified nucleoside
  modified_base order(1^2,29^30): mod_base = OTHER; note = (1,3-dimethylimidazolidin-2-ylidene) Phosphoramidate linkage
  modified_base order(2..23,24^25,27..29): mod_base = OTHER; note = Phosphorothioate linkage
  modified_base 25^26: mod_base = OTHER; note = Methylphosphonate linkage
  misc_feature 1..30: note = RM105728

SEQ ID NO: 1016 - DNA, 30 bp, synthetic construct; identical to SEQ ID NO: 25
  source 1..30: mol_type = other DNA
  misc_feature 24..25: note = DNA
  misc_feature order(1..23,26..30): note = RNA
  modified_base 28: mod_base = OTHER; note = 2-Prime-O-Methoxyethyl modified nucleoside
  modified_base order(2,23): mod_base = OTHER; note = 2-Prime-O-Methoxyethyl modified 5-methyl Uridine
  modified_base 24: mod_base = OTHER; note = DNA nucleotide carrying a 6-amino-5-nitro-3-yl-2(1H)-pyridone nucleobase
  modified_base order(5..6,9..10,13..14,17..22,27): mod_base = OTHER; note = 2-Prime-Fluoro modified nucleoside
  modified_base order(1,3..4,7..8,11..12,15..16,26,29..30): mod_base = OTHER; note = 2-Prime-O-Methyl modified nucleoside
  modified_base order(1^2,29^30): mod_base = OTHER; note = (1,3-dimethylimidazolidin-2-ylidene) Phosphoramidate linkage
  modified_base order(3..23,24^25,27..29): mod_base = OTHER; note = Phosphorothioate linkage
  modified_base 25^26: mod_base = OTHER; note = Methylphosphonate linkage
  misc_feature 1..30: note = RM105729

SEQ ID NO: 1017 - DNA, 30 bp, synthetic construct; identical to SEQ ID NO: 25
  source 1..30: mol_type = other DNA
  misc_feature 24..25: note = DNA
  misc_feature order(1..23,26..30): note = RNA
  modified_base 28: mod_base = OTHER; note = 2-Prime-O-Methoxyethyl modified nucleoside
  modified_base 3: mod_base = OTHER; note = 2-Prime-O-Methoxyethyl modified 5-methyl Cytidine
  modified_base 23: mod_base = OTHER; note = 2-Prime-O-Methoxyethyl modified 5-methyl Uridine
  modified_base 24: mod_base = OTHER; note = DNA nucleotide carrying a 6-amino-5-nitro-3-yl-2(1H)-pyridone nucleobase
  modified_base order(5..6,9..10,13..14,17..22,27): mod_base = OTHER; note = 2-Prime-Fluoro modified nucleoside
  modified_base order(1..2,4,7..8,11..12,15..16,26,29..30): mod_base = OTHER; note = 2-Prime-O-Methyl modified nucleoside
  modified_base order(1^2,29^30): mod_base = OTHER; note = (1,3-dimethylimidazolidin-2-ylidene) Phosphoramidate linkage
  modified_base order(2^3,4..23,24^25,27..29): mod_base = OTHER; note = Phosphorothioate linkage
  modified_base 25^26: mod_base = OTHER; note = Methylphosphonate linkage
  misc_feature 1..30: note = RM105730

SEQ ID NO: 1018 - DNA, 30 bp, synthetic construct; identical to SEQ ID NO: 25
  source 1..30: mol_type = other DNA
  misc_feature 24..25: note = DNA
  misc_feature order(1..23,26..30): note = RNA
  modified_base order(4,28): mod_base = OTHER; note = 2-Prime-O-Methoxyethyl modified nucleoside
  modified_base 23: mod_base = OTHER; note = 2-Prime-O-Methoxyethyl modified 5-methyl Uridine
  modified_base 24: mod_base = OTHER; note = DNA nucleotide carrying a 6-amino-5-nitro-3-yl-2(1H)-pyridone nucleobase
  modified_base order(5..6,9..10,13..14,17..22,27): mod_base = OTHER; note = 2-Prime-Fluoro modified nucleoside
  modified_base order(1..3,7..8,11..12,15..16,26,29..30): mod_base = OTHER; note = 2-Prime-O-Methyl modified nucleoside
  modified_base order(1^2,29^30): mod_base = OTHER; note = (1,3-dimethylimidazolidin-2-ylidene) Phosphoramidate linkage
  modified_base order(2..4,5..23,24^25,27..29): mod_base = OTHER; note = Phosphorothioate linkage
  modified_base 25^26: mod_base = OTHER; note = Methylphosphonate linkage
  misc_feature 1..30: note = RM105731

SEQ ID NO: 1019 - DNA, 30 bp, synthetic construct; identical to SEQ ID NO: 25
  source 1..30: mol_type = other DNA
  misc_feature 24..25: note = DNA
  misc_feature order(1..23,26..30): note = RNA
  modified_base 28: mod_base = OTHER; note = 2-Prime-O-Methoxyethyl modified nucleoside
  modified_base order(5,23): mod_base = OTHER; note = 2-Prime-O-Methoxyethyl modified 5-methyl Uridine
  modified_base 24: mod_base = OTHER; note = DNA nucleotide carrying a 6-amino-5-nitro-3-yl-2(1H)-pyridone nucleobase
  modified_base order(6,9..10,13..14,17..22,27): mod_base = OTHER; note = 2-Prime-Fluoro modified nucleoside
  modified_base order(1..4,7..8,11..12,15..16,26,29..30): mod_base = OTHER; note = 2-Prime-O-Methyl modified nucleoside
  modified_base order(1^2,29^30): mod_base = OTHER; note = (1,3-dimethylimidazolidin-2-ylidene) Phosphoramidate linkage
  modified_base order(2..5,6..23,24^25,27..29): mod_base = OTHER; note = Phosphorothioate linkage
  modified_base 25^26: mod_base = OTHER; note = Methylphosphonate linkage
  misc_feature 1..30: note = RM105732

SEQ ID NO: 1020 - DNA, 30 bp, synthetic construct; identical to SEQ ID NO: 25
  source 1..30: mol_type = other DNA
  misc_feature 24..25: note = DNA
  misc_feature order(1..23,26..30): note = RNA
  modified_base 28: mod_base = OTHER; note = 2-Prime-O-Methoxyethyl modified nucleoside
  modified_base order(6,23): mod_base = OTHER; note = 2-Prime-O-Methoxyethyl modified 5-methyl Uridine
  modified_base 24: mod_base = OTHER; note = DNA nucleotide carrying a 6-amino-5-nitro-3-yl-2(1H)-pyridone nucleobase
  modified_base order(5,9..10,13..14,17..22,27): mod_base = OTHER; note = 2-Prime-Fluoro modified nucleoside
  modified_base order(1..4,7..8,11..12,15..16,26,29..30): mod_base = OTHER; note = 2-Prime-O-Methyl modified nucleoside
  modified_base order(1^2,29^30): mod_base = OTHER; note = (1,3-dimethylimidazolidin-2-ylidene) Phosphoramidate linkage
  modified_base order(2..6,7..23,24^25,27..29): mod_base = OTHER; note = Phosphorothioate linkage
  modified_base 25^26: mod_base = OTHER; note = Methylphosphonate linkage
  misc_feature 1..30: note = RM105733

SEQ ID NO: 1021 - DNA, 30 bp, synthetic construct; identical to SEQ ID NO: 25
  source 1..30: mol_type = other DNA
  misc_feature 24..25: note = DNA
  misc_feature order(1..23,26..30): note = RNA
  modified_base order(7,28): mod_base = OTHER; note = 2-Prime-O-Methoxyethyl modified nucleoside
  modified_base 23: mod_base = OTHER; note = 2-Prime-O-Methoxyethyl modified 5-methyl Uridine
  modified_base 24: mod_base = OTHER; note = DNA nucleotide carrying a 6-amino-5-nitro-3-yl-2(1H)-pyridone nucleobase
  modified_base order(5..6,9..10,13..14,17..22,27): mod_base = OTHER; note = 2-Prime-Fluoro modified nucleoside
  modified_base order(1..4,8,11..12,15..16,26,29..30): mod_base = OTHER; note = 2-Prime-O-Methyl modified nucleoside
  modified_base order(1^2,29^30): mod_base = OTHER; note = (1,3-dimethylimidazolidin-2-ylidene) Phosphoramidate linkage
  modified_base order(2..7,8..23,24^25,27..29): mod_base = OTHER; note = Phosphorothioate linkage
  modified_base 25^26: mod_base = OTHER; note = Methylphosphonate linkage
  misc_feature 1..30: note = RM105734

SEQ ID NO: 1022 - DNA, 30 bp, synthetic construct; identical to SEQ ID NO: 25
  source 1..30: mol_type = other DNA
  misc_feature 24..25: note = DNA
  misc_feature order(1..23,26..30): note = RNA
  modified_base order(8,28): mod_base = OTHER; note = 2-Prime-O-Methoxyethyl modified nucleoside
  modified_base 23: mod_base = OTHER; note = 2-Prime-O-Methoxyethyl modified 5-methyl Uridine
  modified_base 24: mod_base = OTHER; note = DNA nucleotide carrying a 6-amino-5-nitro-3-yl-2(1H)-pyridone nucleobase
  modified_base order(5..6,9..10,13..14,17..22,27): mod_base = OTHER; note = 2-Prime-Fluoro modified nucleoside
  modified_base order(1..4,7,11..12,15..16,26,29..30): mod_base = OTHER; note = 2-Prime-O-Methyl modified nucleoside
  modified_base order(1^2,29^30): mod_base = OTHER; note = (1,3-dimethylimidazolidin-2-ylidene) Phosphoramidate linkage
  modified_base order(2..8,9..23,24^25,27..29): mod_base = OTHER; note = Phosphorothioate linkage
  modified_base 25^26: mod_base = OTHER; note = Methylphosphonate linkage
  misc_feature 1..30: note = RM105735

SEQ ID NO: 1023 - DNA, 30 bp, synthetic construct; identical to SEQ ID NO: 25
  source 1..30: mol_type = other DNA
  misc_feature 24..25: note = DNA
  misc_feature order(1..23,26..30): note = RNA
  modified_base 28: mod_base = OTHER; note = 2-Prime-O-Methoxyethyl modified nucleoside
  modified_base order(9,23): mod_base = OTHER; note = 2-Prime-O-Methoxyethyl modified 5-methyl Uridine
  modified_base 24: mod_base = OTHER; note = DNA nucleotide carrying a 6-amino-5-nitro-3-yl-2(1H)-pyridone nucleobase
  modified_base order(5..6,10,13..14,17..22,27): mod_base = OTHER; note = 2-Prime-Fluoro modified nucleoside
  modified_base order(1..4,7..8,11..12,15..16,26,29..30): mod_base = OTHER; note = 2-Prime-O-Methyl modified nucleoside
  modified_base order(1^2,29^30): mod_base = OTHER; note = (1,3-dimethylimidazolidin-2-ylidene) Phosphoramidate linkage
  modified_base order(2..9,10..23,24^25,27..29): mod_base = OTHER; note = Phosphorothioate linkage
  modified_base 25^26: mod_base = OTHER; note = Methylphosphonate linkage
  misc_feature 1..30: note = RM105736

SEQ ID NO: 1024 - DNA, 30 bp, synthetic construct; identical to SEQ ID NO: 25
  source 1..30: mol_type = other DNA
  misc_feature 24..25: note = DNA
  misc_feature order(1..23,26..30): note = RNA
  modified_base 28: mod_base = OTHER; note = 2-Prime-O-Methoxyethyl modified nucleoside
  modified_base order(10,23): mod_base = OTHER; note = 2-Prime-O-Methoxyethyl modified 5-methyl Uridine
  modified_base 24: mod_base = OTHER; note = DNA nucleotide carrying a 6-amino-5-nitro-3-yl-2(1H)-pyridone nucleobase
  modified_base order(5..6,9,13..14,17..22,27): mod_base = OTHER; note = 2-Prime-Fluoro modified nucleoside
  modified_base order(1..4,7..8,11..12,15..16,26,29..30): mod_base = OTHER; note = 2-Prime-O-Methyl modified nucleoside
  modified_base order(1^2,29^30): mod_base = OTHER; note = (1,3-dimethylimidazolidin-2-ylidene) Phosphoramidate linkage
  modified_base order(2..10,11..23,24^25,27..29): mod_base = OTHER; note = Phosphorothioate linkage
  modified_base 25^26: mod_base = OTHER; note = Methylphosphonate linkage
  misc_feature 1..30: note = RM105737

SEQ ID NO: 1025 - DNA, 30 bp, synthetic construct; identical to SEQ ID NO: 25
  source 1..30: mol_type = other DNA
  misc_feature 24..25: note = DNA
  misc_feature order(1..23,26..30): note = RNA
  modified_base 28: mod_base = OTHER; note = 2-Prime-O-Methoxyethyl modified nucleoside
  modified_base order(11,23): mod_base = OTHER; note = 2-Prime-O-Methoxyethyl modified 5-methyl Uridine
  modified_base 24: mod_base = OTHER; note = DNA nucleotide carrying a 6-amino-5-nitro-3-yl-2(1H)-pyridone nucleobase
  modified_base order(5..6,9..10,13..14,17..22,27): mod_base = OTHER; note = 2-Prime-Fluoro modified nucleoside
  modified_base order(1..4,7..8,12,15..16,26,29..30): mod_base = OTHER; note = 2-Prime-O-Methyl modified nucleoside
  modified_base order(1^2,29^30): mod_base = OTHER; note = (1,3-dimethylimidazolidin-2-ylidene) Phosphoramidate linkage
  modified_base order(2..11,12..23,24^25,27..29): mod_base = OTHER; note = Phosphorothioate linkage
  modified_base 25^26: mod_base = OTHER; note = Methylphosphonate linkage
  misc_feature 1..30: note = RM105738

SEQ ID NO: 1026 - DNA, 30 bp, synthetic construct; identical to SEQ ID NO: 25
  source 1..30: mol_type = other DNA
  misc_feature 24..25: note = DNA
  misc_feature order(1..23,26..30): note = RNA
  modified_base order(12,28): mod_base = OTHER; note = 2-Prime-O-Methoxyethyl modified nucleoside
  modified_base 23: mod_base = OTHER; note = 2-Prime-O-Methoxyethyl modified 5-methyl Uridine
  modified_base 24: mod_base = OTHER; note = DNA nucleotide carrying a 6-amino-5-nitro-3-yl-2(1H)-pyridone nucleobase
  modified_base order(5..6,9..10,13..14,17..22,27): mod_base = OTHER; note = 2-Prime-Fluoro modified nucleoside
  modified_base order(1..4,7..8,11,15..16,26,29..30): mod_base = OTHER; note = 2-Prime-O-Methyl modified nucleoside
  modified_base order(1^2,29^30): mod_base = OTHER; note = (1,3-dimethylimidazolidin-2-ylidene) Phosphoramidate linkage
  modified_base order(2..12,13..23,24^25,27..29): mod_base = OTHER; note = Phosphorothioate linkage
  modified_base 25^26: mod_base = OTHER; note = Methylphosphonate linkage
  misc_feature 1..30: note = RM105739

SEQ ID NO: 1027 - DNA, 30 bp, synthetic construct; identical to SEQ ID NO: 25
  source 1..30: mol_type = other DNA
  misc_feature 24..25: note = DNA
  misc_feature order(1..23,26..30): note = RNA
  modified_base order(13,28): mod_base = OTHER; note = 2-Prime-O-Methoxyethyl modified nucleoside
  modified_base 23: mod_base = OTHER; note = 2-Prime-O-Methoxyethyl modified 5-methyl Uridine
  modified_base 24: mod_base = OTHER; note = DNA nucleotide carrying a 6-amino-5-nitro-3-yl-2(1H)-pyridone nucleobase
  modified_base order(5..6,9..10,14,17..22,27): mod_base = OTHER; note = 2-Prime-Fluoro modified nucleoside
  modified_base order(1..4,7..8,11..12,15..16,26,29..30): mod_base = OTHER; note = 2-Prime-O-Methyl modified nucleoside
  modified_base order(1^2,29^30): mod_base = OTHER; note = (1,3-dimethylimidazolidin-2-ylidene) Phosphoramidate linkage
  modified_base order(2..13,14..23,24^25,27..29): mod_base = OTHER; note = Phosphorothioate linkage
  modified_base 25^26: mod_base = OTHER; note = Methylphosphonate linkage
  misc_feature 1..30: note = RM105740

SEQ ID NO: 1028 - DNA, 30 bp, synthetic construct; identical to SEQ ID NO: 25
  source 1..30: mol_type = other DNA
  misc_feature 24..25: note = DNA
  misc_feature order(1..23,26..30): note = RNA
  modified_base 28: mod_base = OTHER; note = 2-Prime-O-Methoxyethyl modified nucleoside
  modified_base 14: mod_base = OTHER; note = 2-Prime-O-Methoxyethyl modified 5-methyl Cytidine
  modified_base 23: mod_base = OTHER; note = 2-Prime-O-Methoxyethyl modified 5-methyl Uridine
  modified_base 24: mod_base = OTHER; note = DNA nucleotide carrying a 6-amino-5-nitro-3-yl-2(1H)-pyridone nucleobase
  modified_base order(5..6,9..10,13,17..22,27): mod_base = OTHER; note = 2-Prime-Fluoro modified nucleoside
  modified_base order(1..4,7..8,11..12,15..16,26,29..30): mod_base = OTHER; note = 2-Prime-O-Methyl modified nucleoside
  modified_base order(1^2,29^30): mod_base = OTHER; note = (1,3-dimethylimidazolidin-2-ylidene) Phosphoramidate linkage
  modified_base order(2..14,15..23,24^25,27..29): mod_base = OTHER; note = Phosphorothioate linkage
  modified_base 25^26: mod_base = OTHER; note = Methylphosphonate linkage
  misc_feature 1..30: note = RM105741

SEQ ID NO: 1029 - DNA, 30 bp, synthetic construct; identical to SEQ ID NO: 25
  source 1..30: mol_type = other DNA
  misc_feature 24..25: note = DNA
  misc_feature order(1..23,26..30): note = RNA
  modified_base 28: mod_base = OTHER; note = 2-Prime-O-Methoxyethyl modified nucleoside
  modified_base 15: mod_base = OTHER; note = 2-Prime-O-Methoxyethyl modified 5-methyl Cytidine
  modified_base 23: mod_base = OTHER; note = 2-Prime-O-Methoxyethyl modified 5-methyl Uridine
  modified_base 24: mod_base = OTHER; note = DNA nucleotide carrying a 6-amino-5-nitro-3-yl-2(1H)-pyridone nucleobase
  modified_base order(5..6,9..10,13..14,17..22,27): mod_base = OTHER; note = 2-Prime-Fluoro modified nucleoside
  modified_base order(1..4,7..8,11..12,16,26,29..30): mod_base = OTHER; note = 2-Prime-O-Methyl modified nucleoside
  modified_base order(1^2,29^30): mod_base = OTHER; note = (1,3-dimethylimidazolidin-2-ylidene) Phosphoramidate linkage
  modified_base order(2..15,16..23,24^25,27..29): mod_base = OTHER; note = Phosphorothioate linkage
  modified_base 25^26: mod_base = OTHER; note = Methylphosphonate linkage
  misc_feature 1..30: note = RM105742

SEQ ID NO: 1030 - DNA, 30 bp, synthetic construct; identical to SEQ ID NO: 25
  source 1..30: mol_type = other DNA
  misc_feature 24..25: note = DNA
  misc_feature order(1..23,26..30): note = RNA
  modified_base 28: mod_base = OTHER; note = 2-Prime-O-Methoxyethyl modified nucleoside
  modified_base 16: mod_base = OTHER; note = 2-Prime-O-Methoxyethyl modified 5-methyl Cytidine
  modified_base 23: mod_base = OTHER; note = 2-Prime-O-Methoxyethyl modified 5-methyl Uridine
  modified_base 24: mod_base = OTHER; note = DNA nucleotide carrying a 6-amino-5-nitro-3-yl-2(1H)-pyridone nucleobase
  modified_base order(5..6,9..10,13..14,17..22,27): mod_base = OTHER; note = 2-Prime-Fluoro modified nucleoside
  modified_base order(1..4,7..8,11..12,15,26,29..30): mod_base = OTHER; note = 2-Prime-O-Methyl modified nucleoside
  modified_base order(1^2,29^30): mod_base = OTHER; note = (1,3-dimethylimidazolidin-2-ylidene) Phosphoramidate linkage
  modified_base order(2..16,17..23,24^25,27..29): mod_base = OTHER; note = Phosphorothioate linkage
  modified_base 25^26: mod_base = OTHER; note = Methylphosphonate linkage
  misc_feature 1..30: note = RM105743

SEQ ID NO: 1031 - DNA, 30 bp, synthetic construct; identical to SEQ ID NO: 25
  source 1..30: mol_type = other DNA
  misc_feature 24..25: note = DNA
  misc_feature order(1..23,26..30): note = RNA
  modified_base 28: mod_base = OTHER; note = 2-Prime-O-Methoxyethyl modified nucleoside
  modified_base order(17,23): mod_base = OTHER; note = 2-Prime-O-Methoxyethyl modified 5-methyl Uridine
  modified_base 24: mod_base = OTHER; note = DNA nucleotide carrying a 6-amino-5-nitro-3-yl-2(1H)-pyridone nucleobase
  modified_base order(5..6,9..10,13..14,18..22,27): mod_base = OTHER; note = 2-Prime-Fluoro modified nucleoside
  modified_base order(1..4,7..8,11..12,15..16,26,29..30): mod_base = OTHER; note = 2-Prime-O-Methyl modified nucleoside
  modified_base order(1^2,29^30): mod_base = OTHER; note = (1,3-dimethylimidazolidin-2-ylidene) Phosphoramidate linkage
  modified_base order(2..17,18..23,24^25,27..29): mod_base = OTHER; note = Phosphorothioate linkage
  modified_base 25^26: mod_base = OTHER; note = Methylphosphonate linkage
  misc_feature 1..30: note = RM105744

SEQ ID NO: 1032 - DNA, 30 bp, synthetic construct; identical to SEQ ID NO: 25
  source 1..30: mol_type = other DNA
  misc_feature 24..25: note = DNA
  misc_feature order(1..23,26..30): note = RNA
  modified_base 28: mod_base = OTHER; note = 2-Prime-O-Methoxyethyl modified nucleoside
  modified_base order(18,23): mod_base = OTHER; note = 2-Prime-O-Methoxyethyl modified 5-methyl Uridine
  modified_base 24: mod_base = OTHER; note = DNA nucleotide carrying a 6-amino-5-nitro-3-yl-2(1H)-pyridone nucleobase
  modified_base order(5..6,9..10,13..14,17,19..22,27): mod_base = OTHER; note = 2-Prime-Fluoro modified nucleoside
  modified_base order(1..4,7..8,11..12,15..16,26,29..30): mod_base = OTHER; note = 2-Prime-O-Methyl modified nucleoside
  modified_base order(1^2,29^30): mod_base = OTHER; note = (1,3-dimethylimidazolidin-2-ylidene) Phosphoramidate linkage
  modified_base order(2..18,19..23,24^25,27..29): mod_base = OTHER; note = Phosphorothioate linkage
  modified_base 25^26: mod_base = OTHER; note = Methylphosphonate linkage
  misc_feature 1..30: note = RM105745

SEQ ID NO: 1033 - DNA, 30 bp, synthetic construct; identical to SEQ ID NO: 25
  source 1..30: mol_type = other DNA
  misc_feature 24..25: note = DNA
  misc_feature order(1..23,26..30): note = RNA
  modified_base order(19,28): mod_base = OTHER; note = 2-Prime-O-Methoxyethyl modified nucleoside
  modified_base 23: mod_base = OTHER; note = 2-Prime-O-Methoxyethyl modified 5-methyl Uridine
  modified_base 24: mod_base = OTHER; note = DNA nucleotide carrying a 6-amino-5-nitro-3-yl-2(1H)-pyridone nucleobase
  modified_base order(5..6,9..10,13..14,17..18,20..22,27): mod_base = OTHER; note = 2-Prime-Fluoro modified nucleoside
  modified_base order(1..4,7..8,11..12,15..16,26,29..30): mod_base = OTHER; note = 2-Prime-O-Methyl modified nucleoside
  modified_base order(1^2,29^30): mod_base = OTHER; note = (1,3-dimethylimidazolidin-2-ylidene) Phosphoramidate linkage
  modified_base order(2..19,20..23,24^25,27..29): mod_base = OTHER; note = Phosphorothioate linkage
  modified_base 25^26: mod_base = OTHER; note = Methylphosphonate linkage
  misc_feature 1..30: note = RM105746

SEQ ID NO: 1034 - DNA, 30 bp, synthetic construct; identical to SEQ ID NO: 25
  source 1..30: mol_type = other DNA
  misc_feature 24..25: note = DNA
  misc_feature order(1..23,26..30): note = RNA
  modified_base 28: mod_base = OTHER; note = 2-Prime-O-Methoxyethyl modified nucleoside
  modified_base 20: mod_base = OTHER; note = 2-Prime-O-Methoxyethyl modified 5-methyl Cytidine
  modified_base 23: mod_base = OTHER; note = 2-Prime-O-Methoxyethyl modified 5-methyl Uridine
  modified_base 24: mod_base = OTHER; note = DNA nucleotide carrying a 6-amino-5-nitro-3-yl-2(1H)-pyridone nucleobase
  modified_base order(5..6,9..10,13..14,17..19,21..22,27): mod_base = OTHER; note = 2-Prime-Fluoro modified nucleoside
  modified_base order(1..4,7..8,11..12,15..16,26,29..30): mod_base = OTHER; note = 2-Prime-O-Methyl modified nucleoside
  modified_base order(1^2,29^30): mod_base = OTHER; note = (1,3-dimethylimidazolidin-2-ylidene) Phosphoramidate linkage
  modified_base order(2..20,21..23,24^25,27..29): mod_base = OTHER; note = Phosphorothioate linkage
  modified_base 25^26: mod_base = OTHER; note = Methylphosphonate linkage
  misc_feature 1..30: note = RM105747

SEQ ID NO: 1035 - DNA, 30 bp, synthetic construct; identical to SEQ ID NO: 25
  source 1..30: mol_type = other DNA
  misc_feature 24..25: note = DNA
  misc_feature order(1..23,26..30): note = RNA
  modified_base 28: mod_base = OTHER; note = 2-Prime-O-Methoxyethyl modified nucleoside
  modified_base order(21,23): mod_base = OTHER; note = 2-Prime-O-Methoxyethyl modified 5-methyl Uridine
  modified_base 24: mod_base = OTHER; note = DNA nucleotide carrying a 6-amino-5-nitro-3-yl-2(1H)-pyridone nucleobase
  modified_base order(5..6,9..10,13..14,17..20,22,27): mod_base = OTHER; note = 2-Prime-Fluoro modified nucleoside
  modified_base order(1..4,7..8,11..12,15..16,26,29..30): mod_base = OTHER; note = 2-Prime-O-Methyl modified nucleoside
  modified_base order(1^2,29^30): mod_base = OTHER; note = (1,3-dimethylimidazolidin-2-ylidene) Phosphoramidate linkage
  modified_base order(2..21,22^23,24^25,27..29): mod_base = OTHER; note = Phosphorothioate linkage
  modified_base 25^26: mod_base = OTHER; note = Methylphosphonate linkage
  misc_feature 1..30: note = RM105748

SEQ ID NO: 1036 - DNA, 30 bp, synthetic construct; identical to SEQ ID NO: 25
  source 1..30: mol_type = other DNA
  misc_feature 24..25: note = DNA
  misc_feature order(1..23,26..30): note = RNA
  modified_base 28: mod_base = OTHER; note = 2-Prime-O-Methoxyethyl modified nucleoside
  modified_base 22: mod_base = OTHER; note = 2-Prime-O-Methoxyethyl modified 5-methyl Cytidine
  modified_base 23: mod_base = OTHER; note = 2-Prime-O-Methoxyethyl modified 5-methyl Uridine
  modified_base 24: mod_base = OTHER; note = DNA nucleotide carrying a 6-amino-5-nitro-3-yl-2(1H)-pyridone nucleobase
  modified_base order(5..6,9..10,13..14,17..21,27): mod_base = OTHER; note = 2-Prime-Fluoro modified nucleoside
  modified_base order(1..4,7..8,11..12,15..16,26,29..30): mod_base = OTHER; note = 2-Prime-O-Methyl modified nucleoside
  modified_base order(1^2,29^30): mod_base = OTHER; note = (1,3-dimethylimidazolidin-2-ylidene) Phosphoramidate linkage
  modified_base order(2..22,24^25,27..29): mod_base = OTHER; note = Phosphorothioate linkage
  modified_base 25^26: mod_base = OTHER; note = Methylphosphonate linkage
  misc_feature 1..30: note = RM105749

SEQ ID NO: 1037 - DNA, 30 bp, synthetic construct; identical to SEQ ID NO: 25
  source 1..30: mol_type = other DNA
  misc_feature 24..25: note = DNA
  misc_feature order(1..23,26..30): note = RNA
  modified_base 28: mod_base = OTHER; note = 2-Prime-O-Methoxyethyl modified nucleoside
  modified_base 23: mod_base = OTHER; note = 2-Prime-O-Methoxyethyl modified 5-methyl Uridine
  modified_base 24: mod_base = OTHER; note = DNA nucleotide carrying a 6-amino-5-nitro-3-yl-2(1H)-pyridone nucleobase
  modified_base order(5..6,9..10,13..14,17..22,27): mod_base = OTHER; note = 2-Prime-Fluoro modified nucleoside
  modified_base order(1..4,7..8,11..12,15..16,26,29..30): mod_base = OTHER; note = 2-Prime-O-Methyl modified nucleoside
  modified_base order(1^2,29^30): mod_base = OTHER; note = (1,3-dimethylimidazolidin-2-ylidene) Phosphoramidate linkage
  modified_base order(2..23,24^25,27^28): mod_base = OTHER; note = Phosphorothioate linkage
  modified_base 25^26: mod_base = OTHER; note = Methylphosphonate linkage
  misc_feature 1..30: note = RM105750

SEQ ID NO: 1038 - DNA, 30 bp, synthetic construct; identical to SEQ ID NO: 25
  source 1..30: mol_type = other DNA
  misc_feature 24..25: note = DNA
  misc_feature order(1..23,26..30): note = RNA
  modified_base 28..29: mod_base = OTHER; note = 2-Prime-O-Methoxyethyl modified nucleoside
  modified_base 23: mod_base = OTHER; note = 2-Prime-O-Methoxyethyl modified 5-methyl Uridine
  modified_base 24: mod_base = OTHER; note = DNA nucleotide carrying a 6-amino-5-nitro-3-yl-2(1H)-pyridone nucleobase
  modified_base order(5..6,9..10,13..14,17..22,27): mod_base = OTHER; note = 2-Prime-Fluoro modified nucleoside
  modified_base order(1..4,7..8,11..12,15..16,26,30): mod_base = OTHER; note = 2-Prime-O-Methyl modified nucleoside
  modified_base order(1^2,29^30): mod_base = OTHER; note = (1,3-dimethylimidazolidin-2-ylidene) Phosphoramidate linkage
  modified_base order(2..23,24^25,27..29): mod_base = OTHER; note = Phosphorothioate linkage
  modified_base 25^26: mod_base = OTHER; note = Methylphosphonate linkage
  misc_feature 1..30: note = RM105751

SEQ ID NO: 1039 - DNA, 30 bp, synthetic construct; identical to SEQ ID NO: 25
  source 1..30: mol_type = other DNA
  misc_feature 24..25: note = DNA
  misc_feature order(1..23,26..30): note = RNA
  modified_base 28: mod_base = OTHER; note = 2-Prime-O-Methoxyethyl modified nucleoside
  modified_base 30: mod_base = OTHER; note = 2-Prime-O-Methoxyethyl modified 5-methyl Cytidine
  modified_base 23: mod_base = OTHER; note = 2-Prime-O-Methoxyethyl modified 5-methyl Uridine
  modified_base 24: mod_base = OTHER; note = DNA nucleotide carrying a 6-amino-5-nitro-3-yl-2(1H)-pyridone nucleobase
  modified_base order(5..6,9..10,13..14,17..22,27): mod_base = OTHER; note = 2-Prime-Fluoro modified nucleoside
  modified_base order(1..4,7..8,11..12,15..16,26,29): mod_base = OTHER; note = 2-Prime-O-Methyl modified nucleoside
  modified_base order(1^2,29^30): mod_base = OTHER; note = (1,3-dimethylimidazolidin-2-ylidene) Phosphoramidate linkage
  modified_base order(2..23,24^25,27..29): mod_base = OTHER; note = Phosphorothioate linkage
  modified_base 25^26: mod_base = OTHER; note = Methylphosphonate linkage
  misc_feature 1..30: note = RM105752

SEQ ID NO: 1040 - DNA, 30 bp, synthetic construct; identical to SEQ ID NO: 45
  source 1..30: mol_type = other DNA
  misc_feature 24..25: note = DNA
  misc_feature order(1..23,26..30): note = RNA
  modified_base 28: mod_base = OTHER; note = 2-Prime-O-Methoxyethyl modified nucleoside
  modified_base 23: mod_base = OTHER; note = 2-Prime-O-Methoxyethyl modified 5-methyl Uridine
  modified_base 24: mod_base = OTHER; note = DNA nucleotide carrying a 6-amino-5-nitro-3-yl-2(1H)-pyridone nucleobase
  modified_base order(5..6,9..10,13..14,17..22,27): mod_base = OTHER; note = 2-Prime-Fluoro modified nucleoside
  modified_base order(1..4,7..8,11..12,15..16,26,29..30): mod_base = OTHER; note = 2-Prime-O-Methyl modified nucleoside
  modified_base order(1^2,29^30): mod_base = OTHER; note = (1,3-dimethylimidazolidin-2-ylidene) Phosphoramidate linkage
  modified_base order(2..25,27..29): mod_base = OTHER; note = Phosphorothioate linkage
  modified_base 25^26: mod_base = OTHER; note = Methylphosphonate linkage
  misc_feature 1..30: note = RM118133

SEQ ID NO: 1041 - DNA, 30 bp, synthetic construct
  source 1..30: mol_type = other DNA
  misc_feature 24..25: note = DNA
  misc_feature order(1..23,26..30): note = RNA
  modified_base 28: mod_base = OTHER; note = 2-Prime-O-Methoxyethyl modified nucleoside
  modified_base 23: mod_base = OTHER; note = 2-Prime-O-Methoxyethyl modified 5-methyl Uridine
  modified_base order(5..6,9..10,13..14,17..22,27): mod_base = OTHER; note = 2-Prime-Fluoro modified nucleoside
  modified_base order(1..4,7..8,11..12,15..16,26,29..30): mod_base = OTHER; note = 2-Prime-O-Methyl modified nucleoside
  modified_base order(1^2,29^30): mod_base = OTHER; note = (1,3-dimethylimidazolidin-2-ylidene) Phosphoramidate linkage
  modified_base order(2..23,24^25,27..29): mod_base = OTHER; note = Phosphorothioate linkage
  modified_base 25^26: mod_base = OTHER; note = Methylphosphonate linkage
  misc_feature 1..30: note = Control 1
gtcgttaatttgtcccttgctctgatggac

SEQ ID NO: 1042 - DNA, 30 bp, synthetic construct; identical to SEQ ID NO: 1041
  source 1..30: mol_type = other DNA
  misc_feature 24..25: note = DNA
  misc_feature order(1..23,26..30): note = RNA
  modified_base 28: mod_base = OTHER; note = 2-Prime-O-Methoxyethyl modified nucleoside
  modified_base 23: mod_base = OTHER; note = 2-Prime-O-Methoxyethyl modified 5-methyl Uridine
  modified_base order(14,19..20,22,27): mod_base = OTHER; note = 2-Prime-Fluoro modified nucleoside
  modified_base order(1..13,15..18,21,26,29..30): mod_base = OTHER; note = 2-Prime-O-Methyl modified nucleoside
  modified_base order(1^2,29^30): mod_base = OTHER; note = (1,3-dimethylimidazolidin-2-ylidene) Phosphoramidate linkage
  modified_base order(2..23,24^25,27..29): mod_base = OTHER; note = Phosphorothioate linkage
  modified_base 25^26: mod_base = OTHER; note = Methylphosphonate linkage
  misc_feature 1..30: note = Control 2

SEQ ID NO: 1043 - DNA, 30 bp, synthetic construct
  source 1..30: mol_type = other DNA
  misc_feature 1..30: note = RNA
  modified_base 28: mod_base = OTHER; note = 2-Prime-O-Methoxyethyl modified nucleoside
  modified_base 23: mod_base = OTHER; note = 2-Prime-O-Methoxyethyl modified 5-methyl Uridine
  modified_base order(5..6,9..10,13..14,17..22,27): mod_base = OTHER; note = 2-Prime-Fluoro modified nucleoside
  modified_base order(1..4,7..8,11..12,15..16,24..26,29..30): mod_base = OTHER; note = 2-Prime-O-Methyl modified nucleoside
  modified_base order(1^2,29^30): mod_base = OTHER; note = (1,3-dimethylimidazolidin-2-ylidene) Phosphoramidate linkage
  modified_base order(2..23,24..26,27..29): mod_base = OTHER; note = Phosphorothioate linkage
  misc_feature 1..30: note = Control 3
gtcgttaatttgtcccttgctctcatggac

SEQ ID NO: 1044 - DNA, 30 bp, synthetic construct; identical to SEQ ID NO: 25
  source 1..30: mol_type = other DNA
  misc_feature 1..30: note = RM106842
  misc_feature 24..25: note = DNA
  misc_feature order(1..23,26..30): note = RNA
  modified_base 23: mod_base = OTHER; note = 2-Prime-O-Methoxyethyl modified 5-methyl Uridine
  modified_base 24: mod_base = OTHER; note = DNA nucleotide carrying a 6-amino-5-nitro-3-yl-2(1H)-pyridone nucleobase
  modified_base order(2..23,24^25,27..29): mod_base = OTHER; note = Phosphorothioate linkage
  modified_base order(5..6,9..10,13..14,17..22,27): mod_base = OTHER; note = 2-Prime-Fluoro modified nucleoside
  modified_base 28: mod_base = OTHER; note = 2-Prime-O-Methoxyethyl modified nucleoside
  modified_base 25^26: mod_base = OTHER; note = Methylphosphonate linkage
  modified_base order(1..4,7..8,11..12,15..16,26,29..30): mod_base = OTHER; note = 2-Prime-O-Methyl modified nucleoside
  modified_base order(1^2,29^30): mod_base = OTHER; note = (1,3-dimethylimidazolidin-2-ylidene) Phosphoramidate linkage